United States Patent Application Publication US 2026/0058010 A1 - sequence listing, part 49

SEQ ID NO: 538 - DNA, 312704 bp, Homo sapiens
  source 1..312704: mol_type = genomic DNA
aaatatatatatgaaattccctgctttagttgtgtttggttagttaagcagcctctgtatgaatgtctgatgtgcattatgcaataatgtacactgtgcaaaataagtgtactcattgagtggcattacatgtcctattaaaatgatttccctaccaggtatggtggctcatgcctgtaatcccagcattttggaaggctgaggtgggaggatttcttggtcccaggcattcgagaccagcccgggcaacaggatgagacctcatctctacaaaaaataaataattagctgggtgtggtggcatgaacctgtggtctcagctacttgggaggctgaggtgggaggatcacttgagcccaggaggttgaggctgcagtgagctgtgttcatgcctcatgccactacaccactccagcctgggtgacagcgcaagactctgtctcaaaaaaaaaaaaaaaaaaaaaaaaaggccggatgcggtggcttatgcctgtaatcccaacactttgggaggccgaggtgggtggatcacctgaggttgggagttcgagaccagcctgaccaacatggagaaaccccgtctctactaaaaatacaaaattagccaggcgtggtggcacatgcccgtaatcccagctactcgggaaggctgaggcaggagaatcgcttaaaccctggaggcagaggttgcggttagctgagattgcgccattgcactccagcctgggcaacaagagtgaaactccggttcaaaaaaaaaaaaaaagtagacagagagagattttccctctgtttctcttgagtctattgagtccacatgacttaagtaatgtgagataaatgtggtataatgcaacaccgctgtactcataaattcagcaatctaagccctaactctaaccctgggtagattaactgggttagatccaccaaacaacatagcatttctcatggcattaagatcactgggaagtggggtgctagctctgtagaaattaaaataaaaatggacaaggagcttgccttaaaatatcagagaggcagcattatgttttgagagccagaaggctttagtacaaatcctggctccaccactccccgagggcaagccacttaaagtctccctgtcccaggtttcctccttgggactgtcgcaaagattccatgagttaataaacgtaaagtgattagaactgtgcctggcacagagtgaatgccatagacatattagctattgctattattattattcactataatttgcacattgcatcaagtaggttcttattctaaaagtttaaaataaataaaatagtgcatttcactggaaggcactcacttatgcattaagagagcagataagtcagacccttgactcttctctgcaaaagcacagcatggctaaaaattgctgtctggggaatgaactgcttgggtatgatactgggacaggtgaccccattcatgtaacaggaaggaaaagaatgttgcttcaaatctccaaaaaaaaaagtttatttataaaatactgacagtttgacaggacacgggacttcttgtggtatatatttcaaatcaatttctttcttacctttcatttaaaaaataaacctgctaacacgctatatgacatagagatatatatttttttcttacagacagacacctgccataatgaatactctccccataattttttgttatatcttttaaatcaaaaaataaagatttgtgttgatttttgtttctggagtctagatggatggagaaaggtaacacgtttaaatgcttttggttattctgatggaaacaaagagaaggggggtggtcccgagggggcacctgtgctcaggtggtggtcaggattgccatgtgcgcatgcccatgggtgtccctggatagggccatacagaggcactggggagcgggtggcggctgctcagatggtctcccctttaccttcctgcccaccagcccctcacccagggtaggcaccttcagatgtgcactctgggaagctgagggaagcccctgcccagccagagtggcactgtggtgaggctctggcacctttagaagcactgcccagggaggcgtgggcagcaacagaaggccttgaggcagcgtgcaccaggtgggggcagcccccgctgtgtccttgtttcctctaaatcacggcagtgccaggtttgggggtaggagttttgggggccggggggtgagggatggacagaaggggaggcagcctgggtttgcaaactctctggagccctaggaggatggtggttctggagcccagagcatctttttggtttgtcttggcagtgtgggtgtggagctgacgtcaactctggaggcgcagccaggaaggggaaagccctggtgtgcccagcatgggctcctgggtgcaacactgggagattgcttagggcacaaggaggcaatgccaaaggtgccaggtgtgtcctggtgtgaacctgctttgggtggagtcccacaggcaggggccctggcatcactggcacggaaaatcacaggccagaaagggtcccactctttctacaaagggcagggcccaccacccctttctaatgtggccaggtttctgggaggacggttgggagcctcggctgtgccagtagatatgtaaacaagggcaaagagacgtgtcctgaaaaaatctagagttccacagctgcaggcctgggcttccagctgtggctggggctgtggagacaatattccagatgagtgggtattgactaagtgtgggactttcaccatgggcccagcctgatctcatgggcttgtctaaatttgcgtggtgtcctcaccctctcagacaatagatcccagccacgccccaagtgcaagcaacccaggccacctgtgcctcacaggggagagatggcttcagccatcagagggagttcaggagtctctttgctaacacacatacagatgtgtgttctgtgcatatttgtgtgtgcatgtgtgtaagcacaggcgtgcatgggcaccatcccgcatgtacacgtaggtgtcagcatgggtgcgaatgagcgtgtggggagtgggggggtggaatatcttagtgcaccaggtgattcattaaaggcaaaggaaaattgacctcatgtgcaatatatacacagacacaatgtttttactcactcctgcttcctcccaaataatccctcactgggctgggcttaaataattccctaatgcaaactgggaacttccttaaatggttaaatgctcagcagagagggaaagggatgaagttatttaaaaaaaaaaaaaaaaaaaagatgagaggaaagaaaagaaagctgtgcggcacgatcacaggccggcagctgcagatgtgctgccatggagatgccagatgctgcagagggtgggggcggaggtggcaggggtggagcaggtgtccagctgactccactgcagcccccagacaagtccaaggaggccccgagagcaccttacttcctggaggggcagaacctcagcccttggttctcctttggggaagattgtgcttcccttcccaggcctccttattggagaaaccgctttttggacactggagctgggctggcctgtctgctgagccatcttccagcatctccccgttcacatttcccaggggtcaagtgcttcaggaaaaactcatggctgggtgtgcccgttctttgggccccagaccctgacttcccttcccggtcaccattagcacagtgactgacttggggctgtaggagagtggtccaggctctctcttaccttggcatgtttcccaaatctcctacttgggcttccttgaactctgctcacccaccccaacagagcatcatctcttgggcagggccagcagcgcctgtacacagtgcacagagggagccctgctccacgaaggggctcacgctgaatcagacaggcccctgtgggccatctgccacccatctcagcggtggggcaggtgttgggctggccttacagggctggctgagggcacagagggccttggacaatgtatggagttagatagaaaggcttctccctaaaccctggcatccgtaagtaccaagtggacgggaagatcctggccactggatgtggctttttgcagaacactccttggagcagattgtgtatgtgtatgtgtgtgtgtgtgtgtgtgtgtgtgtgtaaaagcattccctcccatcagctattcttgtcacttggtcccatctgacctgcccctgctgggcgtgcaattcaaatgctgggtccactttggactgagcttcctgacctgccccttcccctccccgccctggccaggcggagcccagcctggaagctgttactgggggttagggtgtctttgcctttttgcctgtaaactgggtgctaggctgactgagcaaactctgggtattccagcctctggaccagggacttgggccacccctctgggctcctgtgcctctgtgcttaggaggctgccgggtggcagtgagagggacacagatctgaaagtgagtgtgctgtctggctaggagggcccagatgagtttgttctggagaggatccctagaccctgttccttgtaagtgcatgggagatgtgtgtgtgtgtgtgtgtgtggtgaggatctatccagtggagagtgacgtgtctgcccagagggagatccctcagctgtgccccactccccagccttgggaagctgactacccctttaaagagaggacggatggaacctggattggaagaaagagaacagtcaaagtgtcattcttatcttgcccacaatgcgttaaacctaatcatcccacagtgccaaggccagtcgccttatttacacctctgctccccagacttcacctttccttgtccatgctcaggaaagtcaattccagcacagggaggcaggggtcagttgtggggggtttctcccctacccttgggctctcttccttggattcaatattttaaaaaatatgcaggaacaaggaaggcgctaagcaaattctcaccctttagttttttgttttttgtttttcttcctttttctaaataaaccaaatgcttggtggagaagttgagcaggggagatgggcagtagaggttgccaagacagggcagggggtctggatgaggctgtccgatgcctgccagccacagtgatggtgcatggagggaaggaggagcagagagagaagataggcgtggcctccgggatgcccattctttttgcagagagcagcggcagtgggtccaggggtcctggaggggctggaagggggcagctggctggacatccagaagctttttcttccctcggccacgcctgcctggcggcctccagtccttagcctccgctccctctctctctccagatgcccgccccactccgtgtccatagcagtgacacagccacttccccagctccgtgtaattcccaagggagcagtgaaccccaccatctcaaagctgaagagctgctggccacacacatcctctcacggttttctccctccttctgaacgccggctttgctggccctggaatctctggaaaaataaactcaggaggtgaaaagttgacttggtttcttggtgtttttgttttctggcaggcagtgagaggaggggtgaaggaggagtttggtgccatttctctttctgctttttcctcttctgatgtcaaacaaatgatgaaaatcctgctatgggagcccgggagcctggggccaggctgctggggggacggtagagggtgctctgctgacttggggggttaggggggttctggggcgttggagtccgactggccttgggccgaaagaggctgccctgctgggtgctggtgctgttggtgacggtggtgtggtctggctcacccgagtcgctctccgtgtagctgtaggcctgtgccctcgagatgcccttctgctgtcgccgccacgagttgtagtatgtggggtcactgatgtagtggttgacaaaggagtgggccttctggtggtttgagtcgacctcgtactcgctgtcacttccctgggaggacagagaatcagggtgtgtcagtggccccgtagggacaggccattgtggttggggccggaaggcacagggcattctggttcaaaactctgctctgcctctttcaagacttggactgtgggcctcccagccccctcactgccaagggggtctggtgcccgtttgtgcccgcctgctgcttccttcacagcagatccggaaccggaaggatctactatggggttggcccagagctgggagatacctgatagaatcagaagacctgagtttttttttgtttttgtttttgttttttttttttgagacagaatctcgctgttgccaggctggagtacattggcatgatcttggctcactccaacctctgactccctggttcaagcaattctcctgcctcagcctcctgagtagctgggatgacagacatgtgccaccacgcctggctaatttttttggtatgtttaggggtttcaccatgttagctaggctggtcttgaactcctgacctcaagtgatccacccgcttcaccctcccaaagtactgggattacaggtgtcagccactatccctggcaaattttattttctttcctttttattcttttttttggggggcggggagtggaaggggcacagggaatcactgtgttgcccaggctggagcacagtggtgtgatcctctctgtagcctcaacctcctaagctcaagctatcctcccatgtcagccttctgagtagccaggactatgggtgcatgccaccacgccccactaacttaaaaaaatttttctcttgtgatgagctctccttatgttgcccaggctggtctagaactcctggacttaagtgatcctcctgccttggtctcctaaagtgctgggattacaggcgtgagctactttaccttacctttgttttcttttctttctttcttttttttttgatacgcagtttcactcttgttgcccaggctggatgcaatggtgcaatctgggctcactgcaacctccacctacccggttcaagtgattctcctgcctcagcttctggagtagttgaaattacaggcacctgccaccatgcctggctaattttttgtatttttagtagagatggggtttcaccatgttggccaggttggtcttgaactcctgacctcaggtgatccacccgccttggcctctcaaagtgctgggattcaggcgtgggccaccgtgcccagtctacctttgttttcaattgaagtgaggttcacataaccgaaagtgaaccattctaaagtctatgactcagtgcattaggaccgtcgcagtgttgtgcaaccaccacttctatccagccctgaatcatttccatcaccccaaagtaaaaccttgtacccaggaagcagtcactccctatctctgcccctaccggtcactccctatatccatgcccctggcaaccactaatctgttttctgtctccagggattaacttatttgggactttcctataaatgggatcatataatatgtggtcttttgtgtctggcttctctgacacagtgtcatgtttttgaggttcaaccacaacctactaagttaccatcttggtccagcttctgctttactttgtgactggggacaaagccagagcctaattaagacctttagaggctctggacagtgaaaaatgcctgtgcctgtccacgtgtgatccaacataaaaacaacacttggttacaaactaagcatgagaaaaatctaaaccaaagttcagaattttcatgtaatgaaaaccttaaagttttttttttttttttttttttttttgagatggagttttgctcttgtcgtccaggcttgagtgcagtggcacgatcttggctcacctcaacctctgcctcccgggttcaagtgattctcctgcctcagcctcctgagtagctgggattacaggcatgtgccaccacatctggctaatttttgtatttttagtagagatggggtttcgccatgttggtcaagctggcctcgaactcccaacctcaggtgatctgcccacctcggcgtcccaaagtgctgggattacaggcgtgagccaccgcggctggtctgttttttttttttttttttaagagacaggggtctctctttgttgcctaggctggtctcaaactcctgggcctaaactatgctcctgcctcggcctcccagtgttgggattacaggcataattacaccacacccagcctgaagttcttttttacttttaaagataaaaatattaaattattcctgacttttttttttttttttttgacactttgatgtcctaggcacaggcttcatctatctattggggacatcagccccaaacaagaatcaatctcggttggaaagtaaaatctgaattgtggagctaaaaacatggtgcaccccttcccctaccctgagctcccagcaatgttttgagagctaataagacaacagatgggccccccctcagaactctctggaagagaagtgctccgattttagcgcacagcacacgatcagtgcactgcagctcagaggaccccacccaggcctcctcagtcctgcccagctaatgcccctgcctgggggcagttagcgaatcacagcaatccaagtagaacataaaagccagttagcccaatccagacaagtttgggatggggagctgtgtcctgctttacaggtaaagaaaatggagtggggacctttgtccagagggtctgggctttgggaaatgagatgcacggcttgttctcaggaactcggagtccttcataacatggggatacatctcgagggatgtagctacaatgaatagaactataatgatccccgctaatggagcaggccctctgccagacagtctgaaacgctgacatgcataactgtatttagttttcacacctctgtgcggcagctcctattgctacctgagcaccgacgctgcctgggtactgacgggcacataaagtacaggaagggtgagggttttgctggggaagtgatccggccgggcttgaactccaatctgcctgattttctaaagcccacacacctcttaactcctacactcctgcactcctgcctggagaccacaggatgggaacgagagctccccccaaaccccccaccccgactcccagcaggaattaaatactccctagtccatctgctaatttatgttctctggcccctcccctccctctcctcacccctctacaaccccagccactctccttaccacccctgcagcagacactcccccgccaggacctcaatcctcttggcaggcacagccggctgcccaagacaatggaaagtccctgggctcggtctgccccatgacgcaatgcagcacaatacaagcccctttctgtgcctactgcccagctgcccgcccaggagaacaaagagggggcacaggcaggccagggagactccatatgccgagcgggggcacctgatgctgggccgagtgaggctggcctggagcagcggggatctgtgaggcaggaggctgggggtccatcccgcccaggaacagtgagggtctgtgaatgcgggggaccagacagggatgtcccccagttttccctacaggttcggtctttccacccactaactgacttgaacagttgttagcatcagctccaggggttctagaattttggctagccccaggccccagctttgcagaggaaggaacccctgggtgactgtgggaccatcccacagtgaaacgagtctctggggggaggagcttgtggcacggggaagttctggctcttaccagcagaggaagccatcactcaggctctctcagcctcagtgtccttgtctgtaaaatgggtagagttccatagttcacagggtgaaatgagctaacccaggagagaatgctgtaaaaggtattatcaatggggacagtgagggtgggcctgggtgggaaagggaagagatggagtgagaagcctcaaagctcccctgggagggattagaaggggccaggaagccggggaggctgactcagtgctcaggcaggtggaatgggagtagaaggttagctgataccccacccactaacccccgactccaagacagaggcatgtccggactggaagcaaggtggggagtgggattctctagccctcctaggggcccagatcccaaagcccactcatctagaccatccccgtcctaccagctactatctgcagaatgcctactgatcccaggcactctatgggcagcatctcggggatggaaggcactagaagggagagcagggagccaaacagagcccgcgctgcgggaggggccaggcaggcgagagtctggtctgcctcttcccccgctccgccttccaaagccaaggcaggagggctttgcatcagcgactgctgctcccgcctccatctccctgaacatctgtttcttttcggagtgggggtagggcgagaagagaagaaagcgagggggagaccaggggctcctattgcagctttcaattctcacgggcctcggtaattgaatgcagcttcccagggaccggcccagcacaaagggggcctttcaggggctgtcctgccaggccgccaggcaatcaagtgactgcttcgtctccctggtctcttaacagctcctcaaagccactcaatcagcaattactggggtctgcggagggggagcacagactccaggcctggtgatgggagtggggagggagggccagaaggaggcaggacccctggagaaaagaggaagcaaagcaaagcccttttgcttttttgttcatctccagcccaaaggatctggcaccagactcagccttagggatggtgttgagaccttggggtcaggcaggggacccttatcttgttgaatctcatgaagtctgggaggaatgtgttgccctagatgacagagaagtcaccttgtgaaactccgtgggagactggaagcaggagcccctccctcatccacggtcccaggggctctgcactgactctagcctgaagccggcagcgcatctgtgcggggtgttccgcctgtcccctggatgcctctacccggggggccagccagggtctctctgcaggggctgcagcctctggattaaaggtggggtaggggtgatgtgtctcctgtgtgtctctgaagaacctcagaattgtgcccctggaggcacaattttgtcgaggctctgggctccctgtgttaagatagctggaaatctcccaagaatgtcctttgaaaaatgtcagctcagaagcaatgtcatatgtgccacctgtgcccttataggtaaagtgacagccaatgtgtacccctccccccacacccacaaccggctgtcagagatgtctgtggtcaggaggctcaagggaggtcactggggtggggttggaggcagtgaaggcctctttccttcaatctcctctccgtgctgggcagctgcacgaggccaggctgcagtaggcatgaccctccaagcaagctggctctagatttgaatcccagttgcttgtacttctgagctctgtgaccaagggcatactgcctcacttctgtgaacctcagtttccccagctgttaaatggggatagtttcacttgcatggcaggacagctagatgttaaatgagaatatacaaagcacagggcttggcacacagtatgtagctttgcctctccccggcctgtctctgccccacagcgtttcttgtttggcacaactttgggctgcgaggatctgggggatggtcaggctatcaacgaggtctcagctgagcctgttggactcatggcccaatctgatggaaaagaggcaaacacaggcaaaaggtcagagccgttcagtagaatggtgacggcagaacataaccctgctccagccagctgcaaacctgcacgcttcccttctaggcatgacccagtgctgttcacactttgaggcccagctcaaataaatgccacctccttcaggcagccctctctgagcctccaggggaagtggtctccttatggtgctttatctgcctctgcatcgcaggaaagaaacagaaagacttggccgggtgcggtggctcacgcctgtaatcctagcactttgggaggccgaggtgggcggatcacctgaggtcaggagtttgagaccagcctggccaacatggtgaaatcccgtctttactaaaaatacaaaaattagcttggtgtggtggtaggtgcctgtaatcccagctattcgggaggctgaggcaggagaatcgcttgaacctgggaggcagagattgcagtgagctgagatcaagccattgcactccagcctgggggacaagagcgagacttcatttcaaaaaaaaaagaaaaaaaaagagaaagacttttgttcaccactttcttcctcaggttgctgtggttccataatatttgaatgagaaatgaaaacgtggttatttatacacgtatggtcttccctagtaaatcataacatattataacgcaacattcattagagtctgtcttgcccactactgtagccatcgttcctatatagcgtctgattccattttgtgggtacagaacaaatagctgttgagtaaatgcatcaaggaatgaatgaatgagcttcatagagagcaaacccatcacttactcctcccacgtaccacacagagtcttacctgtgctggtatgcagggcagatgtcaatagggagaatgggggcgggatgcattttgggcttgttgtcaggggtgggggccttcccaactctctttttcatcatctttacttgcaaatggccttaatgccaccagtgcttcctagaggactctgaagcttaggtggtgtcattcacgaacaatccttagaatccttcctggcttctactgaacacttcataaatgtttgctattataaatcggtgcataataaatagtacagaaaatatgattcacggctgggtgctgtggctcacacctgtgatcccagcattttgtgaggccgaggtgggtggatcacttgaggtcaggagttctagaccagcctgaccaacatggtgaaaccccatctctactaaaaatacaaaattaactgggcatggtggcacacgcgtgtaatcccagccacttgggaggctgaggcaggagaattgtttgaacccgggaggtggaggttgcagtgagctgagatcgcgcaccatcatactccagcctaggcaacgagggcgaaactccgtctcaagaaaaaaaaaaaaaaagaaaaagaaaacatgatttgctctgtgtatctcctttttaaagtgtgcttaatttgatttcaacgcacttgaagaggctgtccatgatactgcaagaactgaagatcaagattagatggtgtgtgccattggctcggaatttcttttccattgagatttacttgtgtgctaagtatatacattttttttttttgtacaaaacttgggctcttcttttgaaaatgaagttgccgtccagccaggctgcagtgttaaagttccatcaaacaggcctttaaatctccagtctttgtgtgcatcctgccctctgcctggtgcccccttctcctgcaccctgggccctctacgggagagccagcccctctctcctctagcccatcacccccagctgaattatagcctttctcacatcacatcatatgtgtttgtttataagtcaaactgacgctttgtttattgccatatcacaggaaaacgactgggcagatttctgccaattttggagagtgggttttgggtggtctgtctcagaatataaaccaggtggcgtatgcaaaacccactctccaaagacctgggggaaggggtgtccttgaaaagagaggcagtcatttttcctggcggctgaaaccgaggggccctggcctgtgcagctgctgatcctcagggacgtacccttgcacaaactgtcacaggcaggagaactaccagtggcatccccatcagcccccacttgaaggtcgcaatggtgggggctccgcattgcagatgctgattggtagccgagctgcttctcacgtggctgagtggcagcagcactgacttatttaggagcctcataaggaccacagtggggccagcacagtggttcacacctgtaatcccagcactttgggaggctgaggcgggggaacacttgaggtcaggcatttgagaccagcctggccaacatagtgaaaccccatctctactaaaatacaaaaattagtgaggggtggtggcacatgcctgtaatcccagctactctggaggctgaggcacgagaatcacttgaacccaggaggcagaggtctcagtaagtggagattgcgccactgcactccagagcaagaccctggcttaacaacaaaaaaactcataacttggatcacgtgggttttgtcccccacaataagttcctgggtaagccatgctaagttgggggtctctgtccctgccagctttgagctagggagttaggtccagccttctcagctctgccaagcccatcagtaaccctggagctgaacaaaacagcagtgagtgggaggccctcagcccacggggcccacagcgtgatcccaggcttcctggcacctcctgcacagccagcagcccagctccctgctggcacctcttccttcacttcctctcccaggcctgggcagaaaggtccagggcgtgggatgcagtggcctttcgtggccctttcctcaataaccactgggcttggctgaggcagagggtgagggtgggaagctgtaaggctgcatggttggaatacacacagccccttccccacacagcctgggacagtgtccccacgtgacccacctaatggccgctctctgaagctctgtgtcttccagaggcaccgaccccctcttcatataaaagctgacatttacggaatggttgccgtgtgcctggctctacactgagttcaccagtgtctaactcagcagatcctccccacagcctcggacagagcctagtatcacccctgcctgttccacagatggggaaactgaggcttagaaaggttacttggcacacccaggacatcccaggtcacgagcagcaaagctaggattcacactcaggtccaaacctccaaagcttaatgtctccctggtctacactgcttctcatcctcagggctccagggcacccagccctttgtttctgaagctgttttgatgcgtgagtagtgaagctgagcatttttccaggtctctggcctggaatgcagggctgtgtgtcaaccttctccccagagtctccctctccgcaccttcagcgtgctctcttgcaggacagccctaatgagtaactaagcctgtggggtgacccctgaacgtagagagggccgtcttcttcggggtaccccctatgatcaaggttcccgggaccccattggcactggccgcaaactttgagcagaacttgggaggggacagatggcccatatatgacttcagggtggtttcttgggccccttaatatttgctgccccttgaaggaaaggaagaaagcccatctacgttcactgccccactctgggaggcgctgctccctgccccctgcaggacacctggccctcctgccctcacctgagagtcggagatttctgagggcttctccgtcaggctgctgctctctgcagggatgaggtcgttgtatttggtgacatcctcatccgagtagtgcaggctgcctgggctgggcctggggggagacctggagagagcgggggagtggggccgagaggtgcactcactcagagcggcctcccctggcctagggagaccacagtgggggcctggggaacacggatccctgccaccctgtgctcctcctccttcctgggtctgccttccaggggcccgggcctgggaggtaggaatctggaggaggacaaagagggaaaaatggggtgcccggctaatgctgtcatggcaacatgcagggtgaatgtaggggggatgtcaccgtggctgggttcaggaccccacatcctggggctgctttggtgcaaacgggatttttgtgtacacacagtggctttgggggcacacaggggcctggatgtgtgtgcactgtgggtaggagaggctgggaagggcaggggaaggtgaggccacgtgtgaaatgcccccttgttacatgtagtagggccccggagccagcctggcggggctgctatggccatgctgggcctggctgggcctgctgtgggggcctcaaacagctctttctttggaaggctggatttggcagaggataagagctcggctttgggagctcctccctccatcctctagatgaacacacacatagcttcgtccctctaagacagagacagagggaagctttgtgagctcctgagagaggctggactcctcctgactgccgcctccaatgagctgggaatgccaatagggctgaggctggagacaggagccctctggcccagtctttcttgagctcaggggaacagaaaaccgccacacatcaggggagggtcaggtgggccccagcagctgctcctgcccttggaaatgggcagcccgatggccacagggagtagggcctaggagggggctggggttagaaagaagtcagaagaaaataggagctgtgcttgcaccacgagccttgtcctgtcctcatgggctgctttcagatgctgccctttgaggctgatggggataggaggttgtcctttaataggtataaataaggacctgggggagagggtttcccaaatggggaggaagacaggagggcatagcgataatgcgggtgctcaggcgtccttcgctaaggtgtttttgctcggtctgcgttggctgggcctgtcttgcctttggggccagtgacgatctgcagggctgtttccctggcagttggctccgaacatcagtaggttggtttgaaaaattttgccagttatttgcattctactgtcactgtcaggaactcttagtagctacctccttgtaaatttctccccagtgcgccctcacccccaggctgtgattgggcatggtggggactgggaccctagttgtcctgcttgggccccactgtgtctttctgctgatcgttcccagccctggggcttgaatggtgtttcccaggacaaggtatggccaggtgggcactccctgctctatggccttccccagcattctccccacctgggcactgctgggcctggcccccaacccacgcagagggcccagtacctggtgtacaggccgttctttcggcagaaagagttcttgacggagagccgcctgttgttgagttccagggcagggaagctgctttcatccaagctcatcatctcgctgtggcctagggctccagacttggcactgttccctgaagtcggcgggagattgacaccctttagactgtgtggcctcccctctcccataccactctccacctggctgggttatcccctctttctcttggtagagttgagaccaaaataagagattgagattgtgtgtagaaaccctaggctgccccacccaccagagcaggtgcgctgccaggagccaggagagggacctgatcacccctgttctggccaaaaaggagatacataaaactcaagtccagccagcatggctggtgccagctcactcacccgagtctgtcttcttggcgtacttcttgctctggccccggatgatgagcacgaagaccagaagcaggatgaagatgaggccgaccagggcaatgaccaccaagaaccaccactcctcatagaaggggttggctttctgggctggagcacagatagtcaggtatatagggtgctcagccccctcctccctccaaatctcctgctccagttgggaccctactaactgctacaatctatgggaaggcagggtctgtaccctccgaatgaggcagaacctctgtaaggacagtttcacctcaagtatccgctctgatcagtcggtaaagggctgcctggagggctgatgtcagatgagttctgagatggctacctggctcaataggaaagagtgctaagattgattagtgatgtctgccagggacataggaggggagagtggcagtgtgttagctactttttccccttttttttttttttgagacggagtttcactcttatttcccaggctggagtgcaatggcatgatcttgactcactgcaacctccacttcccgggttcaagcaattctcctgcctcagccttccaagtaactgggattacaggtacctgccaccacacccggctaatctttgtatttttagtagacacggggtttcaccatgttggccaggctggtctctaactcctgacctcaggtgatccacctgcctcggcctcccaaagtgttgggattacagacgtgagccaccgttcccggccccttttctttttttcttttgtacttgtctaggagctatcttgataagcatacctaaatctgtgtggggaaaggtgcttctctggcctgcaggaggatgagagagcttttcctgaggtttagtttggagtgaaatttttgctggtagcagaaggcagggggaattgggaggatggacacaggggttctttagtaaaaggtgaaagatttacacgatctgaagaaaaaccagagtgtggtgagagggtctttaggatgtctcttccaggtagagctcccttttctcaaaacccctagactgtgctttctgcacccagccaggactacccatgctgtgtggacaagagatgggctctctgtttcggccttgaagcacttctgtcccaggatttggttttatcaatgtgggtaaaggagaagatttggttcttcaatgtgggcaatgtgtggcagggggaggaggctgggttcctttgagttgtgcttctgcttgggggaaggggcctttgtattctgggtggttagtgataacattttgggtcaagggtttagatagcagagccctttgtgcgctccaagacatgccagataggaagaatgaggggaggaaaatgggaggggtggtgaccctgctgcacccaggcactaggtcaggcctaaggcccacctgtgtctctgctgctctgcaggctgctgaccctgccacgttggggctggaggtttccatggaaagatagtttatggcctggtgcccatgaatgtcctgggtgatgagtgcatggaagtttgcatcttgggccctctgctctgcccctacccagggcttctggagttccttgaaagggagccccaaagatgaagatccctagtttcctctggtcttgagggctgacccaggcctgggcaccagcacttgcctcttcacagccccgaggggacaatgtgtttttgttcccgccccatgctcctggtgccctggtgcctctcctccttccgccctgcccagtgtcagcccccaggctctgctgtggggctcccccactccctcagcccccaggccggtacctggcacagactgggaggggctgctgggggtgccgaaaccatagtcgttgaccgcgatgacccggaagtcatagctcacgcccggcttcaggatgtccatgctgaacgtgtaggagctcacctccttggggatgtctttgatgaggatgtcccatagtccctcgtctgcaggagcacagagatggaggccctgggaggtgaggggaagccccaaatcccgctcccagccccgttctgactatgctccctgagggctgggcctgttggatcctccctgctccacactgaatcgcaggccttggtcctcccttgaagtttcttaaaaagacaactttcgggccaagcacggtggctcatgcctgtaattccagcactttgagaggccgaggtgggtggatcacctgaggttaggagttcgagaccagcctagccaacatggtgaaaccctgtctctactaaaaatacaaaaattagtctggtgtggtggcacatgcctgtaatcccagctactggggaagctgaggcagggaattgcttgaagctgggagatggaagttgcagtgagctgagatcacgccactgcattctggcctgggcagcagagcaagactcagtctcaaaaaaaaaagacaccttttggagcatctcttttattctttttattaaaatatctgtactacattaaaagatacgtactgtgcagaaagtactgtcacaaccaatgacagaaccaccgtccagagaaacaggctcaaggaattagcacttgtgcaagcagaacactatggattctgtcttccacttcattaaaaatggttggaaacatgattttaagtgactgcctaagacattatcatatgggaatacccttctttacttaactaaccccctttcctaattcaaaacatacacaatggtggcaggagacaaaaataagagcgctatttttcttttttctttgtttcgagacagagtttcgctcttgttgcccaggctggagtgcaatggcaggatctcggctcacagcaacctctgcctcccgagttcaagcgattctcctgcctcagctttccaaatccaccatgcctgactaattttgtatttttagtagagacggggtttctccatgttggtcaggctggtctcgaactctcgacctcaggtgatctgcctacctcagcctcccaaagtgctgggattacaggtgtgagccactgtgcctggccaatttttttttttttttttttttgagatggagtctcactctgtcatccaggctggagtgcagtggtgccatctcagcttaccacaacctccgcctcccaggttcaagctattttcctacctcagcctcccggatagctgggattacaggcttactccaccacgcccagctaaattttgtattttttagtagagacagggtttcatcatgttggccaggctggtcttgaactcctgacctcaggtgatctgcctgccttggcctcccaaagaggattacacgtgtgagccaccatgcccggtctttttcttttctttttagtaacagctgcaggaaagatttggttttaaaaaaattgttttgagatagggtctcgctcggttgccaaggctagagtgcagtggtgtgctcttggctcactgcagcctcaacctcctgggctcaagcgatcctcacatctcagcctctcaaagtgctgggattacaggtgtgagccaccgcgctcagccaacaggaaaaatttgggtttcctgtctgttctccaccctgtgctggcgtcagccacctctgtcctttgcacctgagcttccctcagatccccttcccctctttatccgtggctctctgggccttgccctcgtgggacataattcaccttcatgctgttcagtcagagcggtgcgggtgctgcctgggtcagggacgaggcaagcccctgacatagccttggggcatccatcatgttggtgggaaggccaggaggggccctggctgcatgctctgggtggggctgatggggtcagcctggccctgagagagggtgcgtcttcctgctggtggcagtgcggggctgatttggaaactgaggtatccaagccaccctgggcctagccagacccctcttcacagtagaaggacgtcagtgaggccagctcgcaggtcctctctgtctggcctgctccagggaggtcacccagtggccaacagtgggtcttccaggccgctgccaccagggactaaaaggccttaacttcccctagcctgccccaaccaagcacctccagtctctcacatgcagggcccgttcttctcgccgttctgcttctgcaccctctggttgaagctgctctcccgccagaggtgtgcccagttcaaggccgcccttccccagggctgatggttttgttttcctcaccatactttctcatagacccagccgtgtaagtcgagcactgcagcagaggcgcctcgacaccctggcgtcctgtctgaattttggacccagtggtgggaactgctgagggggctgtctccccacttccagtgtggatccttccaatttggggaaggccatggggacccagtctacatcagagctgtccttgcagaaggctccggggtcccgaacctcggcctcactgttggtcttacttgtttttgagcctctgcctcctacacctccatatatatatatatatttttttttttttttttttttagacggagtctcactctgtcgcccaggctggagtgtgatggcatgatctcagctcactgcaacctccgcctcccattcaagagattctcctcctacctcagcctcttgagtagctgggattataggcacccgccaccacgcccggctaacttatttatttatttatttagagacagagtctcactctgtcacccaggctggagtgccgtgacacgatcttggctcactgcaacctccggcttccgggttctcctgccttagcctccggagtagctgggattacaggcacacgccaccaagcccagctattttattttttattttttatttttagcagagatggggtttcaccatattggcgaggatggtctcgatctcctgacctcgtgatccgcctgccttggactcccaaagtgctgggattacaggcgtgagccaccgtgcctgacccatctttttgtttaatatctctctttctctctttcccctttgctggctgtgaaatccctcaagggcaaggatcatgactaattcgtcttaagtcatccttagtccagcacccagcacaggcaccttctcagcatttattgaataaataaatggaacctttcctccctggccttttcatagcattagctgcccagtttcggaacttcatgccttgaaattttagtactggggtacaaatccattttcctcacatgcctctgaattctctcactcatctttgaatgatatcataatgatgatgatgacggtgacaacagctggcacttacgcctctgtcaagcatcctgggtctacgtgctttccttttcaaatccacagcaatggcgagagggatgaactactgtccccattttacagatgaggacaccaaggcctggaggaagcttcactcatcttcccaaggtcctacgctgtcagcagcagagctggtgttactgcctggggccacctcatttctggcaccgaacttccctgcccaacgcagtcaggtgttggacctgtgtttgctggatgggctgggatcattgaggcccctgctgctgccttccagaagctgggatctcctgcctgctgtttaaccccccttgttccaccccacacagggacaaagggtggggctgagtcaaccgggccaggccagaagctgctggaatgtcacgctggggctctagccgccagccccgggagttggctgatgtgcaggacgggttcctggggctgcaaatccctgggcgaacctctccctgggtctgcagcgcctggcagctcctggcttatagaaagggggtgtatttagtttatcctgcctagcacgaagcacaagcaattcaagggcaaatgtatgacaagggctatgccatcctgaagatgagaaggggagcacagaagaaggggcagggggcatggaggggagagatgctcaccccataacagcagcctgctctcaaacagccttagggacagaccaccatgccccttgccccctctcctccctcctccctgtgcctggttactgatcctgtcctctgctctctggccctggccctgctccgagtcctggtttctcacagggccctggcttggtccttccttttatgctcaggtcttgattccaccagtgtggaccaagtcacagcccacaaacttggaacaccagagtcccacgctgggcctcccaggaaacactgagaatcaacagagccagagtcaggggccaacattccacagcctggcaccccaactggccaacttgggtggaataaacaggtgcaggccctggttgggagaagcacgtagtggtctcctggccaactcagcagccggcaccagagggccagggagggaccatctggagtggggagagagccagccccgcatgcatcctccggccacacagcagatctgagcagctagatgtattcgctatatgcaactgcgattattagcatgtgattaaggcaggagcggtggtaatgtcttccaggagctactagaattattaactctctgctattgggatgattagtgcccagctacctcgaagtattaacaattcatcactgggatgtttccatattccccattagaagtactagctaccgagatgcctggtggcgtcccattatgattgttatttgctatttgggctagagcaacaaaatcttgttttccttctcaattttaatcacctaaccgcggatccatgggatacagagaacaggcctcctgctcttgctgactctggcacctctgattaacttggaaacctagcaacgcagggagctggcagtggctgcaagctcctgagagtaagcagagcccagcaagcgggtgtcaggatgggtgaaaccggagcagtggggagcagccccccgactgacttatctgtcactcatctcctgatggctttggaagttcttgtgattcaatttcaggcttgacaggagaggctggtacgattatagcagccactgagacagccatgatggcagagacagggcttcgagaggcagccagggtcttcttagttatggggcacccatcagtggggtcgtgtggaggattcggtgtgtgacccacgtgagccacgtgctcaggcttccggcttcctgagcaatcctcaacccaagctggtcctcagttagcactaacagccgttctctgggggcctcctgggggttacttagctaggagtccagctctaggagccccccaacccagtttcccactcctcaacagggccaggtgacttcacctgtagtagcacaagcgccttctcaggcggaggacagaggcaagtgccccaagtggagggacccaggaagaagggagataatgagctgtggggtctcagcccagcagggcggggcgcacctgaaggtctggcctcgatgacgtagcgggtgatgggccctttgcccgggtctccgctggaccagtgaatggcgatggcagagctgtaccgcacgatgatgggcacgccaggcggtcctggggcacctgcagacagcacacagaggcgagggatgtatggaacccagaacagccacccagcccgtcaccctgggctcgaggaggaacactgggtgacaaaaccaaccctggacagagagccgccaggaagccctgcaaatgtcgcggcctgagagtacatctcaggctgggcctgccaggatggactgttgtccccctgggctacccctatgctccatattccaaatcccagggcagaagacaaatggaatggtccagaaaggtccctggagtagagccaggagacctgggttccagcccagaacgtgttagatgggtgattttgatcaattcacatagccttccagtgcctccgtttccccctctataagggccttttggaaggtaaggcttgaaggctgtgtcctggatggtggggaatagaggtgggtgcgatgatggcagagtgggcccatgagaggagggggttggtcggagcggggctgaagagtccagtttctccctcctggtaggtgatatgatgtccgccctccctcattcctgcctaaaatcccccaaccccaactgcatttcctattaggttagacaaggggagagggggtttatgccccaggaggccttggggcctgtgctgctaggaggagggaggaaggactgggccccatgccgcgctcctggaatgaaggtacgtcaggagcagcctgggatgtgggccagtgagggagccggccctaggagctggagcagatgagaggaggtgactccagcaatgagaggagtgagccaggtatctgtctgcaaggggctctgagccccttctcttgggggtgcccgtccagaatcccgaccccacatgctgtcacctccaatcctgctccccaccaaaggtggggctctgtacccccagagctgggtacacagtaggtgcttcctctgtgcttaggggatgagggagggaaccagtgcatgagtgggtggccacctggtttgttggtggggggtctctgtggagcagagtctagcatcacactgatgctcccccagggccctggagggccagcaggccctccttacacagcctggcaaccccacccggccactatgcccaccccatcgctcacacagcctggcagccccgcctggcccctatgcccaccccacagcattggagggcaccatttccttccttccctatggagcagcctgtctgcagcacaagggcagagtaactgcggggtcaggtggggtggacacgcctgagggagtatggtagggcaggcagccctcaggaccctgtactcatcctgcacaggacagtactcagggctgaggacagagcctgcaccttctccggggccaggagcttccagcgagtccagccactgcctggctgcatgttccccgcctgcagaccgccccctgcacccacaccatgtgggaggatggcttctttatttctttttttgagacacgttctcactctgttgcccaggcgggagtgcaggggcacgatcacagctcactgcagcctccacctcctgggctcaaacgattctcccacgacagcctcctgagtagctgggacttcaggtattcaccagtatgcctggataattttatttttgtagagatggggttttgctgtattgcccaggctggtcttgaactcctgggctcaggcaatccacccgcctccacctcccaaaatgttgggattacaggcgtgaacccccacacccggctggttctttctttctcagagtgccctccactaccttctctgaaccctctgccctttatctcctcccacctccccacctctcagcctgggacacttcaagcctcaggatagaacagcctgtcctccgcacagccctctcctgtccccaggccactgccaacgcttggtcctcagttgcttgccagctctctctcctacttttgtttcccaggaagctggctcaggtgagaggcagcgcggggcggggctggaggcagatgaaaggacagcggctgggtggctcctgggctgcctcctgcaggctttgtcctgagtttgccctagagctacagggcttctttgcagaaccagactgtggggaatagaaagtgactggccagaaagaaaaagtgaagcgcagccagactaagccattaggggaagactctcttcctgagtcaggctaattgggactgctggggaggggaggcctgcgccattcttggctgaagggggtgggcagaggaggagatgggattttaggggaagtccaggatgggctgtaccccttcttagggagggaggcagcagagtggtctgggaggtgacttttgtgttcaggacaggacattctacactgaccagtaacagggactttggagggctaaaccttgaccatggcaaatgcctggggggatgaggggtgggaggggaagggaggtgaagaggacatttaaaggaggcgattgggcacagtggctcatgcctgtaatcccagcactttgggagactgcagcaggtggatcacttgaggtcaggagttggagaccagcctggccaaaccctgtctctactaaaaatacaaaaattagctggtcgtggtagaaatcacctgtaatcccagctacttgggaggctgaagcttgagaattgcttgaacccgggaggtggaggttgcagtgaactgagattgcaccactgcactccagcctggatgacagagcgagactctgtctccagaaaaaaaaaaaaaaagcccaaacaacaacaacagaaacaatacaggagattaaggaagacttcctggggtgaggggcgggcagttacacacaaaagggcgttctgcggagggggtgggtggtgaggtgggggaggcagggccctggctgtgaataggtgacctgctccatcaggtgtttctcaaggtgccactttgtcacggcctccaggggcttttgtctaagtgcagactgccaggtcccacctcagccccaggaaatcaacccctcggagcatccaccctgggaacgtgcattttagtgcgccctgctctgagaaccgctgcctggagggtaggggtggttcaggggcgtgggaagatggctctggctgggcgaaaggcaggggcacctgccaggctgcatccttccaggacggaagtaaaggaggccatgcaattagcagggagagaaagaacgaagcaggcgcagtggccaggccaggcctgtgggctgggcctaagtgggagaggagggggcgctgctccagggtttgtggcttgaggaacctgaggacacattaatcaaagcgtggagcccgggaggagggagcggggggaggggtcactgggcaccaggggaaagagtgagctctgtcctccactctgtttccagggtccagcacagctcttgacaccgggggccccttctgactggggacgctgaaccgccgtgtggaagacatgcctggtccgttgctctcctaccttctccggggcccgtggtgacgttggcttcgatctccggcccgtaggtgaaggtcttggctctgatgcggaacctgtaggtcaccccctccgccaggtccttcaccttcagccacagggggctgttccccttcacgtccacggtcacgatcttgctgactcctgggggaggcacagcaagtggggactgggcacagggcccaccgagggcactggaggccatggggaaggggaagcggccgtggcctgggccccgggaccctgggtaggggcctcactccttgaggtcaggctgaaatgcacccccagcccacacaaccacattgcccatgctgtgtttctcacagcacggtcctgcctgctgttctcagggagaacggctccatggttcagtatgtttgggaaaagctactactgtctgtgtctactgagtagccacagggtccatcatcagcatctacagaaaagagaacactcgccatcctgtttaatgtaacctctgcaccccaaatatgtttcggctccattgctattcccttatgcagcatcccatgggactagaattatatcctttttcaggaagtgcttccataaaaataccaaaagcccagagttgcggggacacacttttgaccaggtcctccacctgagccccactccagctccacctctggggttcagccaggagctcacatggccctccagcacctatatctgccacaattttttttttttttttaagacaaggtcttgctctgttgctcaggcacaatcatggctcactgtagcctcgacctcctgggttcaagccgtcctgccactttcagccttccaagtagctaagactgtaggtgtgcaccatcatgcctggctaatttttaaatttttgtagagacagggtctcattatgttgcccaggctggtcgcgaactcctggcctcaagtgatcctcccaccttggcctctcaaagtgctgggattataggcatgaaccactatgcccagtccaccaagctttttagggcaaaagtgaggatgcctcagcaccccaaatcacagcaactagaggggacgcttgagccagctttcaggaggtgggggtttgcactctgtgcttcgcgaatccaaatactcctgactgccagcctccctgggagccggggttagtgtcatttcccatgtccatcgagcacgccagtcaccagtgaaagacaggccttgcagccaataggctgggctcagacccagtgatggcgccggccccggcatgtcccttaacttggcttcagtttgttctgccgagtgagggtgtccacagcatcttaggcagggatgctatgagctttaagtaaaataacagagcatgtaggtgcctgacctatttattgactaagtggattactaatattatcgttttgaggtggattttcactattgttgcccaggctggagtgcaatggcgcgatctcagctcactgaaacctccgcctcctgggttcaagcgattctcctgcctcagcctcccgagtaggcgtccactaccacacccagctaattttgtatttttagtagagacaggattttgccacgttggtcaggctggtctcgaactcctgaactcaggtgatccaccgcctcggcctcccgaagtgctgggattgcaggtgtgagccactgcacccggccgctaagtggattactaaatgatggaacaatgtaggctcagaggggcttcctgaaagaatgaaatgaccctgggaccaggaacagggactctggctacctgctccttgacaattctgaacaaagccctcatctgcctggaccttggttttccctacaggacagtgggggctgctgggcttttgtgaggctggtttgctattgacctgaacccaggatgaactggggtgtggacactgggctgtccaggcggggccttgtcttgctgtacttattaactgaactattatgggaagatgggaatgtgtaggggtgtggagttgagccacacagtccagatcccaccagactgtggaattggaaggcaaagagctcacatcctcaagttgagagggtcctggacaggccaggttgaggcccctgtgaagagggcttgtgctggccccctgtaccttgtctcggggactgctgtcctctgccccactccggccctgcacctgactggatctcctgctggggcctggctcccccctggtgttctaacacacagctcccctttgcagaacgagctgctggcacccaggtggtagcagggaagactgagggccattgttccctaggctcaccgagaactgctggtcacaacgatgttcccaggtctctgccccttgttcttgccaggctccgtgattggagggggtgagagtgagaggggtggctccagaggtcagccacacccccagcacctggctgggactagtcccaggcagtgaggaacgcagtttccttcctgcctaaatcccatcctcataggatggttgttcataacaaaatggcagggatttcttggcatgttaccaggggtagaaagctggcaggtaccagatgcccattgtcaggggctgcgcagcccagcctaggagcccagaaatgggcaggttcccagctggggcccggaggaaggggtcagaagaccagtcagatgaacagggttaaggacaagagcgaggtcatttgcagagcagggctcttgatctggggtccgcagatagcagtggggggtgcagggacctccttggtcttgtgtatcttcctggggagaggctctgaagctttggtcagattctcatcagattctccaaggggttcctgactcccaccaaagctaaagaaggactaacccacagtaaagctgagaaccctaaggtttgggaaagggcaaagtaggaccctcaggggctcccctcttctttttcttttcttttttccttttgagatggaatctagctctgtcgcccaggctggagtgcagtggcgtgatcccggcttactgcaacctctgcctgccgggttcaagcgattctcctgcctcagcttcccgagtagctgagactacaggtacccaccaccacacccggctaatttttgtattttcagtagagacggggtttcaccatgttggccaggctggtcttggaactcctgacctcaggtgatccacccgcctcagcctcccaaagtgctgtcattacaggcgtgagccaccgtccttggctgccccccttctttatggtctcaacagagccctgtccactcaggtttcccttcctttcctccctgtttccgttgaccaaagggggaagaatatatttaacgattctctgcctggaagttaggagacctggatctctcttccaactctgccctcaacttgctgttgttttaccttggaaatgcactttcccttgtctgggactcagtttccgtgtttataagatggggagactctcaccgaatctcactcatgtgtagtggctgtgatgggcgctgagatgagagcgagcttttgcaaagtggggggctggggagctgtgctggggggtccactcaccatccacggggctgcagggctcgtacaccagcctgtagccctccaggatgccattggggaactgcggggcttcccaggacacattcactgaggttgtggtcagctcactgaacttgaccgagctgggagcgctgggggctgcgggagacagcaaagggtttttgtttccttcttctgtggaagttcaaagcctcgggttcagctccaaggagctagcgggagtattgggtctgagcccgggaggaacaagagcgtggggctcggcagaaagggcgggcaggaggggtcactggaggccatcaggcccccttcctctcctctctcaactttccagtatcagagtcctaagaactgggaagaaagagaactcgatttttccctcaagttgcagaattcaggcttctccctgctaagtggctctgagcccgggctatgagtgtgggacaagctgtcacacccccggggtcatcgtggggcaaggccatttcctggctttgcggggttcgtcttttggctttcgtggagaaggtgggggtgtctgggcctcagaatattcggtaggcgctaaacaaagaagacaccagaaccacagcagacggagatggccttcctctcctcctggggctccagggcttgtcacagaggccccacgcagtcagggggagccacgccaaggacagtcagaccctctgggagaaatgttttctcggaccaagaaccctgtggcaaccccaaaatcatgggggtgggggctcccctgatggggaggacagaggaagggcaggaagcgtcccaatctgcggcatccccagctggcccagggaggatgaccaggctattattgtccggcgctgcctccccaccacgctggagctaatccggacctgcttccggctccagccccaggaggcagagtcagcgagtgtctttgaaggagggaggtgagctcagggggcccttcctgcctcccctgtgctacagggacgtgggacagaacatgttgtcctgctgccgcagtgacggaagcctcgggttccctggggttcgcatctggcagatggcactgacaaaagagtggccgggacaggaggcggacggacagacttgtatattcagcagctcacgctcattctggccaccgtcagaccctgggggtagtggagggaaagggttccctggagccagggcttgtccccagagagggtcataatgaggaactgatgccacaggtgtgccctctgcagctctttaaaagccacatgtcactgacagcataggaagcagcaggttgaacaagatgctcaagggaggccggggcaaaaggccagtattccagtccacgaggacagaacacttggttctctcagaaatcctgggttccagcctctgctgccccagtgaccagctgggcaaccctggacaagtagtataacttcctgggtgaccccggctcatcgtgagatgagggtgctgcctgccctgcctgtccacggggcttctgggagggttaagtgtgacagtgcctgactaccaggctcgctctgcacacaggcagcaggattctcaccagcgccctctcctctgcacccgccacccttcagcctcccgatctcccctccctgcctctactctctcccctccaccaggccatcttctgcacagcagccggagcacttttctctaaatgtaaaccagaccctgttgctcaactgctcaagccctcccatggcttcccagcatactttttaaatttttttattttttaagacagattattgctctgtcacccaggctggagtgcagtggtacaatctcagctcactgcaacctccacctcccaggttcaagcgattctcctgcctcagcctcctgagtagctgggattggagaagggtgcaccaccatgcccagctaatttttgtagttttttaagtacagatagggtttcatcatgttggccaggctggtcttgaactcctgacctcaaatgatccacccacctcggcctcccaaagtgctgggattacaggtgtgagataccatgtgtggtccattgtacttataattaatcccaatcccaatcccccagcctgagctctcgccccattttcctgcaagccacctggctttctctgcgttcccgggttcctctccagcccctaggccttagcacctgcggttccctctgcctggagcccccagcaccctctgccacctcctgagagcatctcatggctggcctcttgtcttttttttttttgggacagagtcttactctgtcacccaggctagagtgcagcagtagcacaatctcggctcactgcaacctccacctcccgggttcaagtgattctcctgcctcagcctcccaagtagctgggattacaggcacgtaccaccatgcctggataattttttatatttttagtagagacagggtgtcaccatgttggccaggctggtcttaaactcctgacctcaggtgatccacctgccttggcttcccaaagtgctgggattacaggcgtgagccaccatgcctggcccctgccggcctcttctcattcaaatctcacctcctcagggagggctttgtgggtgagcctatccagagccatccacccactcctgcctcactcttaggtcacctgtgctgacccccgtctgcatttacttcatcaacttgcttatgatctgtcccccgcactagggtggggaccttgctggtctcactgttgtgtccctagcatctagcatggcacgggctcataagacactcagtatttgtggaatgaacaaagccagagagacagagggaaggcaggtgggaagaaggcagggagcagaagtaggctggctgggaggggctgggggtgctgactgtccgtctgcaaggcggggcaaacggtggggaggacagggatgaggtgtgggggtttctcaaggctttatggggacagcttctcttttctgagaatgggctctcccacttgggagggtgtctctggggacctgggtaccacgaccagatcctcaggcggataaggcagctgcccccatgcctgccaagagcccggatgccaggtaggtcctcttgcaaccccccgtggccgacctacccctcccctcctcagggccccctctcccacctgcttgctgggtctggccttgggtgggggtgctccgaggcccatccccagcggcgttgaaggcggccacgctgaccatgtaggccgtgtagccagtcaagttcttgagcttcacgctgttctcagccaggaaaagcgtcttcactcgctctgtgaggttcccccgctgggcttcccagaaataaatctgtgggaacagaaggatgtgggagtgagggggacaggggcaatgagagtccctcctgtccctgctgacctgtagtctcagagacaccttcattgctgtgagtcacctgggaaacagcggagaagtctttaagaggccgggtgcggtggctcacacctgtaatcccagcactttgggaggcagaggtgggtggatcacttgaggccaggagttcaagactagcctggccaacatggtgaatccccgtttctactggaaatacaaaaaaatcagccgggcatggtggcaagtgcctgtagtcccagctactctggaggctgaggcaggaaaatcacttgaacctgggaggtggaggttgcagtgagctgagatcacgccactgtactccagcctgggtgacagagcaagactccatctcaaaaaaaaaaaaaaagaatttaagaactgttttagaaacctttctggaaccttccttttcacagccaagaccctggtctctgccagacagtaaactccagggcatggcccccaagtgtctgtgtttcccgccatgcctggaggatttaccatagcgctggcacatcagcacttagtacagttcctggaggaataaagcaaatccgtcctacgggaggctgagctggggagataaggcagtgtggagtctatccagacagagtgtggtgcaagtgctggtggcctcatgtcacctgggagctggtgagggatgcagagtctcagggccaccccgggcccgctgcaccagcagctgctggttaacaggaacaaggcccgctgcagaggaaggcctcggccaagacggcgggcagcgggaggctgaatcccagctgcaccgcatacagcagcgggacctggccagctgacttcccagagctgcagttttgtcgtacattcagtgaggttaaggacacgtacttcctggggtccgtgtgaggggtgcaggttctaagggtttcacccaggtacttggccagtttcctaaggaaccccgtggctgcagaaggctttaggccaggaacacaacagatgctccctggtgttttctcttcctttctgttttttgagatggagtctcgcactgtcacacaggctggagtgctgtggtgcgatcttgctccgcctcacgggttcacgccattctcctgcctcagcctcccgagtagctgggacacaggcacccgccaccacgcccggctaatttttggatttttagtagagacgggatttcaccgtgttagccaggatggtctagatctcctgaccttgtgatccgcccgcctcggcctcccaaagtgctggggttacaggcgcgaaccaccaagcccagccattgttttcaatcatttcctctgtagcacaggttaacacttctgctagttccaggactgaggccatccagatagcggccagctgggcccagccacgtgcaaaattggaggtcatttggcgccccctgctggccaatgaggtttctgcatgtcaccggcttttcaatttctcatttccctggaggaagcccataaagtgagaaagagctaataaaagtgtccccactggcatgtatgggtggcagttaggacatcttgttaccatgaaatccttgcttttctccaatccctctccccctttattattatttttttatttgagacaggcctcactctgttgcccaggctggagtgcagtggcacgatcacagctcactgcagcctcaaccacctgggctcaagccatcctcccacctcagcctcctgagtggccaggactacaggtgtgcaccaccacacccagctaagtttttaattttttgtagagacggggtcttgccatgtttcccaggctggtcttgaactcctgggctcaagcgatccaaccaccttggcttcccaaagtgctgagattacaggtgtgagccactgtgcccggccctctctcccattttattttattttattttatttcaagacagggtctcattttgtcacgcagactggggtgcagtggcatgatcttggctcactgtaaccttgacctccaggttcaagcaatcctcccgcctcagccccccaggtagctctgactacatgagtgctaccacacctggctatttctttcgtagagatggggatttcttttgtagtgatttcttttttagaaagggggagagggccgggtgcagcggctcacacctgtaatcctagcacttgggaagctgagagaggggaatcgcctgtgcccatgagttcaagaccagcctgggcaacatggcaagacccctgtctctactaaaaacacaaaaattagccaggagtggtggtgtgcacctgcagttccagctacttgggaggctgaggcaggaggatggctggaacccgggaggtgaaggttgcagtgagctgagatcacaccactgcactccagcctgggcaacagaacaagactccatctctaaaataacataaaaataacgaaaagcagattcttctcatatggatagatgaatgaaagcagaggcagtcatgtatgaaatcattcattcactcatgcattcatactaatgggggtacaacagttaacaaagttcctgttggatttggaaaggtcatggctgatgctaaaagtttgccattattagcacacaggtggtcttccgtgagtgcacactgggagaatgaatggattctcttaggtagagaagagggctgtggattgatccctgggggcctccagcattcagtggttggtggggaggaagagctagcgagggaagctgaggaaagcaagcattttgagaggaaggagagatccatgtgtcaaacacagctgctgagtcaggcaggataagcctgtggtttgactcgatatgagcaacatgggaattattaacaactttggcaggaagagcttcggtggggtggcggggatgagaacctatttggagcgagttcaagggagaaagagagcagaggaatcggagggagtgagtacagaagattcttttgaggaattctgctgtaaaggggccaaagaaatgggtgacaactggaagaaaatgtgaggtcaggccaggtgcggtggctcacacctgtaatcccagcactttggaaggctgaggcaggtggatcacctgaggtcaggagtttgagaccagcctggccaacatggcgaaactctatctctactaaaaatacaaaaattagccgggcatggtggcggatgcctgtaatcccagctactcaggaggctgaggcaggagaatcacttgaacccgagaggtggaggctgcagtgagctgagatagcaccactgcactccagcctgggcaacggagcgagagtccgttaaaaaaaaaaaaaagtgaggtcaggaaaaggcataaaaagaggaaacatatctcagaatgcttttctgccctgcccgtgggagctatccactggggaggtggaggagaggaagggccaatggctgcagtcatgctcttgggtgaggagtgggtcggggcctagaacccagggacagctgtcttcacaaaccaggcactccggcaggtgcatcttgtttgtgagcgctgcattctgcggacctttgttagctgatgattcacagtgagagggactgacacgcgtgcaaaggacataaagggactgagcccagatcctggttcccatggggcacactgctgagctgcatggggcacattgatgggtaaccaggagtctgccagaatgcaggctccagcgggcaggcatctcggtccatgtggcccccttgggacccaaacacctagaatcatggctggcacatccatggtcctcaatcaatatctgctggatgaataaatgccttatgtggacaggggcaagcatgggagtgcaccattataatcacgaacctgccatttactatgcccaattctctgccctttcatttcttttttcagctttattgaggtataattgacaatctaagatctatatatagccgggcatggtggtgggtgcctgtaatcccagctactcgggaggctgagacaggacaatcccttgaacctaggaggcagaggttgcagtgagtggagatcacaccactgcactccagcctgggtgacagagtgagactctgtctcgaaaaaaacaaacaaacaaaaaaatcaaaaaacaaaaaaaccccaaaaaactgtatgtgtttaaggtatacaacatggtgttctgatatacacatgcattatgaaatgattaccacaatcaagctaattaacatgttcatcatctttttgtggtgagaaccttctgagcaaatttcaagtgtacaatacggtatcattaactatcatcaccatgttgtacattagatctagatcgtattcagcctgcttcaccgaaacgctgtatcctgggaccttctccctatttccctcactccctcagcctctggcaaccgctgttctactctctgttcctatgagtttgattattttagattccacatatacgcgaggtcatgcagtatttgtctttctgtgcttggtacatttcatttggcataatatcctgcaggttcatccgtgttgttgcaaacagcaggatttccttcaaggctggatggtattccactgtgtataaaccacattttcttcattcattcatccattcacagacactcaggctatttccacatcttggctactgtgaatgatgctgaaattaacatgggcctgcagatagctcttcaagagcctcatttcaattcctttggataaatacccagtagtgggattgctggatcattggagttctatttttaattttctgcggaacttccataccgttatccataatggctgtactgatatacgttcccaccaacagcgtgcaaaggttcccttttccccatacgcttaccaccacttatctctagactttttgataacagccatccttgcaggtgtgatgggatatctcactgtggttttgatttgcatttccctgatgctgagcgatgttgaacaccttcttagatacctgttgaccatttatatatcttcttttttctttttttttgagttggagtcttgctctgtcacccaggctagactgcagtggcatgatatgggttcactgcaacctccacctcctgggttcaagcgattctcctgcctcagccaggtgcctgccgccatggccagctaatttttgtatttttagtagagacggggtttcaccatgttggccaggctggtctcgaactactgacctcaggtgatctgcctaccttggcttcccaaagtgctgggattacaggcatgagccaccgtgcccagcctatgtatcttcttttgagaaatgtccatttgggtcctttgccccattttctttcacttttgttgtatgagttccttacatattttggctactaacccctggtcatatgtatggtttgcaaatatttctcccattccagaggttctccctccttctggaagcatgttcttcccatgagctctgagacatcactcagtttttggtttcagggctcaatttgtagacttcttttgttctttatctttccttgtctaatctctagctttcagtaccatctatatgccgaggactctataattcacatctctggtttgatccttctctcttgaactccagacatgcatctctgactctgttctgtctcccctcgaatgtccaacagacgtctcaaaccaaacacatctggaaccagactccagatttccctagcctcctccttcaccagctttgtcttttcctgctccatcatcctgtggaccctggggctgtccttgttgcctcccttttctcccattccatgttcgatttgtcggtaattttttttttttttgagatggggtctcgctctgttgcccaggctggagtacagtggcgtgatcttggtgcactgcaacctctgccttctgggttcaagggattcttttgcctcagcctccccagtagctggaattacaagcatgcgctaccatacccagctaatttttgtatttttagtagagatgcggtttcgtcatgttggccaggctggtctcgaactcctgacctcaagtgatctgcccgccttgggctcccaaagtgctgggattacaggtgtgagccactgtgcccagcctgatttgttagcaaattctaccagctctgctgttgggactaactgagagtggccacttctcactctgctctcacctgatctgagcccccttcatggcccacccggatagttcagatgcctccccatagcttctgggctttccccatttcagactctgctcagcacagcagccagcgggaccctctgaaggtcccagtcctccactcagaggacttcactcaagagtgacagccaaagccccgaaggaccccaggtgctccagccccggctttcccatctcccattgcgctccctggaactcactctggggacacacaaggctctccgtataccccaagtacctgtctaccctgagacctttgctcttttttcctctctttctggatccatgtgatttgtgccctgttctccttcaggtttttgctcaaatatcaccttctcattaagtcctttcctaacaacctttttttttttttttttttttttttttttttgagacagtcttgatctgttgcccaggctggagtgcagtggtgcaacaatggctcactgcaccctcactcggccgggctcaggcactcctcccacctcccaccccgttggctgggactacaggcatgtgccaccacacccggctaattttgttgttgttttctttttgtagagacaggcttttaccatgttgcccaggctggtcttggactcctggagtcaagcaatccacccacctcggcctttcaaagcgccaggattacagttgtgagccactgagcccagcccttaacaacccatttaaaatttcaaaccctggctgggcacagtggctcacgcctgtaatctcagcaatttgggagaccgagggcggatcacctggggtcaggagctcgagacaagcttggccaacatggtgaaaccctgtctctactaaaaatacaaaaattagctgggcatggtggcaggcacctgtaatcccagctactcaggaggctgaggtgggagaatcacttgaacctgggaggcagaggttgcagtgagccaagatcgcaccactgcacttcagcctgggtgacagaacaagactccatctcaggaaaaaaaagaaagaaagaaataaaataaactaaactaaaataaaataaaatttcaggctggatgcgctggctcactcctgtaatcccagcactttgggaggccgaggtgggtggatcacgaagtcaagagattgagaccatcctggccaacatggtgaaaccccgtctctactaaaaacacaaaaattagctgggcatggtggcaggcacctgtaatcccagctacttgggaggcggaggaaggagaatcgcttgaacctgggaggtgggggttgcagtgagctgagattgcaccactgcacttcagcctggcggcagagcaagactccgtgtcaaaaaaaaaaaaaaaaattcaaacctcctcatggacctggctctcccctaacctgcttcatttaccaccacctggcggtattatttattttgccccgtgttggccttccctccctaacatctaagctcacaatgctgggcacacaataactgctcaataaacacgtgtcattgaccaactgaaagactggagctctcagaacgtgcatgaatgtgcctgccacgcaccagttgggtgcagtctgactggaatgcagtatcagcttcggtgtgctcatgggttgatgaagttaatgcgtcactgatgttcgtgcgtgttgatgtcagtaccttggttatcacaggtccaggaggtagcactttctccgttcacatccacagttgccgctcaggtacgggtcatgttttctggagcatgtaggcctctgctgtattctgtatggtgttgtgcacctgcacattttcctgggtctgtctattaactcaccacttacaagcctcgacagtctggtggctgccacactgctgctggcgctgccctggcccctttcttttcccatgggaggcatatgctaggggggcaatatttagttttcccagctggtgctcctgggcaatgccttgaggggtgtcatccatctttagggcttccttggcaacatgcctttcctccttccttcctcctccttcaccccagatggaatgagactcttatgctggattccatcctaaatcgggactacctgtattaatgagctgtgtgacttgggtaagctcttcccctttgctgacactcctcccacctgtgggatgaggtgccttgtgtctctcctactccccacctgtgggatgaggtgccttgcgtctctcctactccccacttaagccatggcactggggctcttctctggagtaacaaccagccgccaagaatgagagtcaactggacactggtgcgggaggcagacacagctaagggttatgtgttccagctcttccaaccagacagacacattccttttttttttttctttttttttttttggagacagagtcttgctctgttgtccaggctggagtgcagtgacacggtcttggctcactgcaacctctgtctcctgggttcaaacgattctcctgcctcagcctcccaaatagctgggattacaggcacccgccaccacgcctggataatttttgtatttttagtagagatggggtttcaccatgttggtcaggctggtctcgatctcctgacctcaggtgatccatctgcctcggcctcccaaagtgctgggattacatgtgtaggccaccacacctggcccatgttcctttttaaatctacttcccctagtgctcatgtggttggttagtgcttacttttcacccctcggggggtgagagctgccagacttggaatctgactctgctgcctgctttttttttttttttgagacctcttggctggagtgcaatggtgcaatctcggctcactgcaacctccctctcccaagttcaagtgattctcctgcctcagcctcccgagtagctgggattacaggcatgcgccaccacacccggctaattttgtatttttagtagagatggggtttcaccatgttggtcaggctggtctcgaactcccgacctcaggtgatctgcccgccttggcctcccaaagtgttgggattacaggtgtgagccaccgcacccggcctgcctgctgtttttgtgatcttaccaggtcaactaaattggaactcagtttcctcatttgggcataaaaacccatatcctcccagcttcgtgggcctttcatgaagattcaagagttccaaagggctttgtgaatattagggagaaattgaatccccttatagcacaggacatcatcctaaatctagaaatgatttttttcttttttgagacagtgtcttgctctgttacctggctggagtgcaatggctccacatggcctactgcaaactctgcccccctggctcaagcaatcctcccacctcagcctcccaagtagctgggactataggcgcatgccaccacacctggctaatttctgtatttttttttgtagagtcaggttctcactatgttgcccaggctgttctgtaactcctgagctcaagtgatccgcccaccttggcctcctaaagtgcgggaattacaggtgtgagccaccacacacagccctagaaatgatttttaattttaatttttttttttttgagacagagtctcactctattgctcaggctggagtgcagtggtacaatctcggctcactgcaacctctgcctcctgggttcaagcgattctcctgcctcagcctctcgaatagctgggattaccggtgcctgccaccatgcccggctaatttttgtatttttagtagagatggggtttcaccatgttggccaggctggtctcgaactcctgacctcaggtgatctgcccgcctcggcctcccaaagcgctgggattaaaggtgtgagccaccgcgcccagcctagaaatgatttttaaacagagatttccaaatactaggcagtgatgctttgctaactggctatctgattaatatcaatattgtaattatggggccaaaagccccttggagggtcttaagttatgtatggggttgggggctggtggggagggatgtgtgtgctgctcagagatggtacgagcctagggatggctagagtttcttgcacctaagctcagcctgccctcaggaagctggaggggatggatgtggttcagcttcagctgtacaaatatttctgcgaactgggtccaaacagccaaggtggcaggtgtaccacagagcctgaagggccgaggagctggctggatgaatggagggcctggggacctgcctgcctcccacatatcactcactccccagcctccgacctggcttctcatccgtgcacccctttgctctgcccgagggcaccctaccttgtacccctggatgtctccattctggctgtccagcggaggtggctcccaagtcacgtccagctgtgtggccgtggcgccgtggacgaccacgttacgaggtgctgctgtgggcactggagggcgtgcagggtaggcagtgagcatgcgagtaaacctgggaggggaggtgggctgggcgggatggggagcccagatcccgtttcttccagctgaactgggtggggctgggaaaggcatgctggggccggacagggcgggcgctgctcacctgcctccccaacaaagacctcctgcggggggctggagggcccctcacccacagcgttgtacacgctcatccgtatctcgtaccgcctgtgcttgttcaggtctgtgggggagagtgggggaggggaagcacactgaggtcaccgtcattgctgggaaggtgtccccagggagggtggaggctgcagggggaggaatgaggcacccccgccattctagccccctctgtgaaggtgcatgaaggaggaggtgagaggcggggcccccaggggacgctctgtgccaatctggacatagggcaatgctggttggcctcttggcctagggtggccgtacattttattgttcaactggacacttttgagactgaaaccactatgaatatttacaccgggacaaccagtgtaaaccaaagctgtcctgggcatgcctggacatagggtcaccccctacccccagcctgtcctctttccccaccgtgacagatgcccagagtccccatccaccaactctttacacagcggggctcagctccaggggggaggggcgcattggatgtgaattctggactaagaaacctgatgtttctgccaagtttgaggtgcttggctgagaatgcctggcagaacttgggaatgggacgcagctgcaagaaacgggcgcagtcactgtcccccgtagctgaaagtttctcccaccctctccactcttctctctgggttccctgcccctgcttccttcccctgggtaggtctaccctttaacagggttgtgagaggggtgtcacccttgcctagctgtctatgcagcctgggttggtcattggttgacggaggaaggaggaagagaatttagccttaaactagtgctattttctcctgagcacgaaaccctcttgcctaaggccctgggtttcaggaagaaccacggctgatgctttagagaaagatcaagggttggggcatgcaagcagcaggaacatgtctggtgcacgggaggacgacggacgcaggtgactaaaactgctgtcacctccctccaggtgtggggccagactgtaagacccagctgggccgagaagtgccttcgatgggactagatggggcagcaaccacgtggacacctgcccacctacccagcagcgtccaacagcttctgctgcggccccgctgtcactgtcccccgacccagccgagcacagggttacagacttcccttttccagcccacacccaacagagggcaggcttgaaggagactttccctgtcatcggcctacttttccgtgtgtttagggttatcacttgtgttcagggtagtcccgtttcttaagccccctggggtgggcacaccccctcaacctgtgatcaggtctctcaaggaggccccactcccaatcccctgcgaggcctgggcccgcgatgaagccaccatgcaaggagacttactgtccagctcgtactgcgtgaggctgggccggctcaggttccgcatggagtacatggctatggggtgggggtgccggggcgggggcgcagagggagacagcagacagaggaggttagtgctcacacatccccaccccacaaagaaaccccggccaggcggggctgacggcgtgaacagacaggaagagtgtttccaaatttccaatgctgagttacgggccaggataacagggttgtgggggcaggggaaggtggaggctccctggacagtctgccccaccctggtgtgcactggcccaaggtgatgtgagctctttgtagcccagcatctctagggacatctctgggggaccctctcaccccaattctcttccttgtttcagggcagagctcctggaaaccagcatgaaatactggagtcgttaatttcctcatatgaaccagaaacaattttactactaggaaatatgactgtattatacacaggcaatataaaatcacaaccacaagcacatatgggcaaaaaaaaaaagaaggaaaaaaagtccaccaaaaacgcaagctgttggatcagctacttcagagtttttctattaatattcctttgctacatgctcatcattttgttgtctgctaactcactagaagacaaggcacaaaaggcttgagagaactaagggaggaaacgtgaaaatgaagaggctgggccgggcgcagtggctcatgcctgtaatctcagcactttgggaagccaaggtgggtggatcacctgaggtcaggagttcgagaccacctgaggtcaggagttcgagacgagcctggccaacacagtgaaacccggtctctactaaaaacacaaaaattagctgggcatagtggtgcacgcctgtaggtccagctacttgggaggctggggcaggagaatcgcttgaacctgggcagcagagctgagatcatgccactgtactctagcctgggtgacagagcaagactctgtctcaaaaaacaaaaaacaaaaaaacaaaaaacaaaaaacaaaagccgggcgcagtgactcatgcctgtaatcccagcacttcggaaggccgaggcaggtggatcacctgaggtcaggagttcgagaccagcctggctaacatggtgaaaccccgtttctactaaaattacaaaaaattagctgggcgtggtagtgtgcgccgttaatcccagctactcaggaggcctcaggcaggagaatcgcttgaacctgggaggcggaggttgcagtgagctaagatggtgccattgcactccagcttaggcaacaagagtgaaaactccatttcaaaaaaaaaaaaaaaaagaagaggctcttaaactgacccctctcctgctagtctgtttgggtgagtgtcccacacccacctgagtacccagtcctctggggtacccctgcctgctgccgtcttctactacgaatcagtcatggagtcccaggtgggtggatagaggatatttagggaaggaggctctttataaaaatctctagtggtctgagtccaaatcttaggtgaacgcaagcacttcagacccaaacaagccaaaggtgtagatgaacatcagttttgagccactgggaaaacctcagttttttctttcgttatgtaccaaggtgttctaattatcgttgctacctgctgtgctgtaacgtgttttatcggttgcaccactttgcagcattttctccaaagcccttaactgtcgtaaatgcacctaactgtccgccaatgcggaatactaaataattatgatgcgagtggctgatttactttgaaaaatcaaaaacaggccaggtacagtggctcgcgcctgtaatcccagcactctgggaggccaaagcgggcaggccacttaaggtcaggagttcaagagcagcctggccgacatggtgaaaccccgtctctactaacaacaacaacaacaacgacaacaacaacaacgacaacattagctgggcgtggtggcacacgcctggagtcctagctacttgggaggctgagacacaagagtcacttgaacccaggaagcggaggttgcagtgagctgagatggcaccattacactccagcctgggcaacagagcgagactctgtctaaaaaaacccaaaaaacaaaaaaacctcaagtcctggagcatctgcgcccatcacatatcatctcccatactggcctcggtccaccccgagtctgtgcctcggttccaacctcctgctctcttgccacgtgactgcaacagcctctatctgggcgcctgcctctggctctccatcctcccaccatggccaagccatcatcctcatgccaccaaagtggctcctaacacaaaagtccaaacacgtctttcccttgccgtggtcttctgggcatcggctctccctgacatttccacctgggctcccctctttccttcctttgctccaggggacaggcagggcagtggcttcccccaggaaaaagagggggccaggactactgctctaggggtgtgaccaggtgaggcttctggtccctcaagggcagggtgctccttctcatgcaccgggctgtccccgtccctttgtcctggttaacttggcatcatccttccgtgttagcgccagtgctggtgccggggaagccttgcctgtccctggctttaggtcctcctagaatgtttccttcccagctcgcctggctcctcctccagcctgcaactccaagagggcagggaccctgtctgtcttgatcattggtgtgccccacagtgactcggggcccatagaaggtgctcagtaaatattcagtaaatgaatgaatgggatgggaggagggagaggcacacatggaggagggaggcaaggtttcaggttagagtggttccaggaagctgagagctccagagcgggaaggtgagggtgaccgcccccatcccacccattcctctggctcccaagtgtcactcacaggtaagctcagcccatgtggcccctgggttgttgatgcctcgaagcgtgaagcccctcagtccttcatagagcagctcccggtatcggatccggaagcccaggaggatgccattgatcttgtcctctgctggcggctgcaggaagggagtagggcatggggagggcacctggaccaccacccacccctccccacgctctctcatcatgcctcctgcagccacagagcagggactatgttttaaccaggaaaagaaatcaagataatattgggcattttaaatttacaaagcacttctgatgaggccatttcatccctgcagcattccctagaaggagggaagggcaggaatcagtaatcgccttttatccaagcaggaaactgaggctcagagatgttaaggaacttgcccaagatcacagagcatcattggggcctggagcacacagctgttttcctagagccgctccttgttcacctcctttgtcttcaagagctgccctcacctgatcaccagcctccccaggcctgctggtccctgccttagcatctggataacacttcctggtgtttcctgcaagctgagccctctcctactcttagtacatgcaagggtgagtgtgcccctcaccccttcatcaagttctcctttgcttcctctcccgtctacagcttagctgcagaaccggcttcgggagaaggtggaaactacttcttaatgatactgcttatgaagaatggtctgaccagcctggccaacatggcgaaaccccgtctctactaaaaatataaaaattagctgggtgtggtggcatgtgcctgtagtcttgcttggaaggctgaggaaagagaatcgtgtgaagctgggaggcggaggttgcagtgagccaagattgaaccactgtactccagcctgggcaacagcgcaagactgtgtctcaaaacaaaacaaaacaaaaaccccaaaaaaccaaaaacctgctgaaacagctcaggctttgttagctccttaatggtttccccggctgccatgggcacctccctgccccctccctctgccacgttgctccagcctcgtcccggtcacaggtgcactaagtcatgtttatctacgggagcgtcctctccttgagctgtgtgtctcaggctggggggaccctcctggctttgtcttcaagggctttccctttgtggagtggcagatggctgaaggggagtgcctgcccctttgatctggagaagtggtgatgggagttcagtgcttttaacttttagtagagatggggttttgccaggggtccctctcatgtgggtgacctgctgaggcaaggctgaacttcagagggcacaggagggctccgcggggcaggacccatgagcagcctggtcgctgaggtttgcccatggtcttccccaggccatggcagagcaggcagtgcccactgaagagtgggcatctggaaggggtatggacgaaggggggcatttctctctacttgcacagtgatgatgacgggcataggtctctgcaaggaatcccttcaccgaccagtggggcttcatggagactctgggggccctgagagccacaagcacttttcagcccaaggactcagcaggcctaaggctaatacacctggccctgccactcactggctatgtgacctggggccattcgggtcccctccctgagtctcagtggttgtctgcagaagaggatgacagcacctgcctgatgtgactatctagagagtgtaatgaggcgtgttatgggagtgtgtatgtgtgggcacacggtgtatagaatgttctgtgacatgcacatgcctggatttctcatggcttcccaggcgctctgggggcagagaacttgggggctccacgcagccctggtggggactgctggctttccagtcccagagcagagctcgtctgggtcttcacggaggtttcctgcccgctgggccatacctgccatcggattagcacggaggtggtggtgtggggcgtcacggagaggatggtgggtgcttcatcgggggctgtggagagaagcagacaggtgggttctgggggccgcagcttcaagttccccaggagcccactgagaccagattctgctaatactggactgcggggcaggtccagatcgcatcgccctccatgcctgctggcccgatttctgcagaacaaagggctggtgtaaaggggagggagggagggactgtgagctgactcagcccaaacccaagggtcccagagccccctccgctctgctcctcagagccatagaccacttctgctgctgctgagaactcctgtcccgctcactggcagcttgtgggacaggaggaatacgccacaggccaggctgggcctgggaccctgagcccttggcaaaagtgtctctggcccaaacctccctgagaccctaccccgggagctgaagggcccagtgggtcccacgcctctctcatctttggaggcccctccccccgtaagaaaatgccccatgcccaggaagcagccagtgggctgagagagagactgctggggaaggggtactgaccagcctgcagggtggtcagtgactccgactcctcgctgaactcgctgtcgccaatgtcattggtcgccttcactcggaacttgtaggacgtgaagggcttcagcctgtagggagaaatcagggccaatgagccaaggtgctccttaaaggcctcgccccatgctcccaccaaggagtctccctgatctggccctgctcgggaaagggggcagggtgccagcctactacacagaagggcacactgaggctcagaaaggagctttgctgcaaagaggacaaactgggacccggccccaggggtcccaagcacctagaccaggtcctccagaccatgccagcttggggtgcctttagccccagttgtaagccatagcatcccgagaaggaaatgtctgcagcttccccacttcgcagaaccatgcagtcacaaaagcaccaatacctccactcggaacaaactcctcccctgcccccaacaaactgccatctctttctttttttttgtttgagatggagtctttttttgttgttgttgagacagagtctcactctgttgcccaggctggagtgcagtggtgcgatcttggctcactgcaacctccgcctcccgcgttcaagcgattcttgtgcctcagcctcctgaatagctgggattacaggcatgtgctaccacacctggctaatttttgtattttagtagagacaggttttcaccatgttggccagactggtttcaaactcctgacctcaagtgatcctcccgcctcggcctcccaaagtgctgggattccgggcgtaagccaccgctcctggcctctcttttttaaatgtagtaaattagggaggagctgaggttctcaagagttaagcagtacttcatctctataagccttatttcctctgggagcaaacgtctctcttttagatttatggggggtgggagaggtggggaagaaagtattgctcaaaactcccggtcacatcaactggaatataaaaaattcaacccactcggaattaaattgaagctagaatttcggagtgacgctccactcccctattaaagctggagaggaagataccgcccggctggaagaatcactaatgaaggatgacaggcacttcactaaagggggacttctaggctccagaaatagataattaagaggcaacctaacagagttccagagggaacagagtgaggaagagcaggatagagctgatttgcgagggtgagagtggacgcgggggccgcctgggtggtgcatgtaggaggagagctgggggcaggctggaggtgttttcagaaggccccctacccagtggaggagcaccgctggtcccggcggggagaggggcagtggggatgctggcatggacccgagccttacctgtccacaatgaagctggaggcattgtggctcacggaggccgagtgcagtgcccacctgccgctgggcagctcgcgggtctggatggtgtagtagcgcacaggggagagcccgtcgctccctggctcccaggacagcagcacgctgcgtgctctcacatcctcctgctgcaccatcggcctgctggggggctgcggacggtctgggaggtggcagagggggaggagcaggtgagtgggccaggccatggtggagggggctggactttctcgagggaggaaaggaggtgatctgggctcaggcctggcatccccttcccatcccaattccatgcacgcaggatccttgcaggttctcacacctgggtacagccagcacccctctcctggttagaggcccaccctcaggctcctagagccccagggcctgggaacttacagctcctcagggcagccctaagcaaggattgacggtgaggagtgacaaacacccacccagctcctttgctcctgcctgaaacgaggctgagccgggccctgcgctgtccctgattgagcaggatgaggttgtttccctacgagaagcgctgcttcattccaggccctagcttggcttccttctctccccagcctcgctgccccgccccttctgcagggcttctcaaacctcagcagtactggaattcagaacagatgactctgtggcgggggcatcctatgcaatgcaggatgctcagcagtgtccctggcctccacccacttgatgccagtagcactcccacactgtgacaaccaaaatgtctccagacatgtccaatgtcccctgtggccaaagaagtccccagttgagaagcactgtactaatggtttttcctgagtacattttcttcttccttccctcccttccttccctccctccttccttccttccctccctctccttccttccttccttccctccctccttccttccttccctccctctccttccttccttccttcccccctcctttccttttctttctccctctcttttctccctccttctcttccttctccctccctccctccctccctccctttttccccccttccctcccctccctttcccttccccctcccctcccctctcctcccttcccttccccttccccttcccctccttcctttttctttcgttatttaaaacacagtcagggtctgtatctgtttcccaggctggagtgcagtggcacgatcatagctcactacagcctcaaactccttgattcaagcaatccttctacctcggcctcttgaatggctgggactacagatgtacaccaccacacctggctgatattcctttcttttttttttttttttttttgagacggtcttgctctgtagcccaggctggagtgcagtggtgtgatctcagctcactgtgacctccgcctcgcaggttcaagcgattcttttgcctcagccttccaagtagctggggttactgacatgtgccaccatgcccagctaatttttgtatttttagtagggacgaggtttcaccacgttggccaggacggccttgaactcccgacctcaggtgatccacctgcctcggcctcccaaagtgctaggattacaggtgtgagccaccatgcccggcctatagctaatatttctatgttctgtagagatggtgtctcactatgtggcccaggttgagagtagtttctaatatatccctatcaggccagtcggggtcccaggcttgcttttggggagtccaagatcaggcaaggtgccagctcagggcagcagtgcagtggcagccggggctccaggctgcagccctgatcctgcgcccatctgtgttgacaaggccagggctgtgagtggggaggggagagggaagatggtcactaaccctcccttaattaattaattaatttagacagagtcttgttctgtcacccaggctggagtgcagtggtgcgatcttggctcactgcaacctccgtcccccaggttcaagtgattctcgtgtctcagcttcctgagtagctgggattacaggtgtgtgccaccacgctggctaatttttgtatttttagtagagacggggtttcaccatgttggctaggctggtctcaaactcctgacctcaagtgatccacccgccttggcctcccaaagtgctgggattacaggcgtgagccactaagcctggccacaaactttccctttagaagaccagaccagagtagggtccttgggtgtgaacttgcggctcatctctgggagtctattagaccccttgctgactttgacttcagagattggagcccaccttccattctcatccagggcactgcagctcataccagccatccactaggaacagctcagagcactggctggccccccctcagctgcccccaagccttccctggcccccgtgggcagtcacctctcttctcggtggtcaccaccaaggcctcggcagcttctccccagcccttgcgggtctgggccgtgatgcggaacaggtagacagactctggcttgaggcccgtggctgtgtactgccgggcgctgggtgccagcacctccacagtggcggtgttggccgtggtggtgttgagccggtgtgtgatctggtaagctgtgggaaggaagcacatggctattatggcaagcaaggcaagccgctcctagggccccgggaagggttgttccgtccaaagccacagctgtgtctgtacatggccaccttgccgtggtccctttggctgtggtctgtctgcctgaggtctctgggtcactctccagtcttcagctgccacctggggagggtggactgtgggtggcatggagaggcactctatgcacagtgtctgtgacccccgtaacagccccaagtgaagaaactgaggcccggagaggccagaccacctgctggtaagtgacagagctggaatcccagcccaggtctttctgggctaatgcacttgtccttcctgcccccactctgtcttggggatgtggcattgctctagggcaggtggtgcgtgaggtcaggactgagaaccctgggacaggtacaggtagtccaagcccccattttaaaggtgagggcactgaggccgcagaggggagtagacttgctcaagttcacgcagctgccgaccggaaccctgggtgtgtgtattgggggaactctaaatgtgagatgaagcttcccatctgtagcctccctcctgtgcgccttgagactcttttccagctgtgctgagcctgccagcgtgccctcacttggccatgctaaggaacagcgtccgaggtttaccagatggccggcaggctgggggcctggggacatttggggacgcaaagccaacccatgactcttaagggacttcaactctgatcttgccctccggaagataatcttacacactggaatttctagcaggaggactaacacccagatcccattctagaggggatgtggaggctccctggacctactctccctcaagctggtaacgaagtggcctcctttgcagctcatgcctcttccttcttcctgcagccggggcacgggaagggcaaaggcttaccaagaatgatgccattgggggcggcagggggctgccagatcagccgcacagacgtggtccgcacctctgggaacaggatgcccatgggtggtcctgggactggagggggcaaaggagaggaggccgacccatgaggctgccgctcagctggggatgagcccagctcgggcagagcagcctggcagggtggagggggaaggggccgcccagctcagtgaatttctgtggagtactgccctgtgcctgacactgtgttaggagccaggggcaagaacgtggaaccaagggggctttctgccctcaaaataggcatcatttggcagcgacctgaggctccagcttcctctgctcattgtctgtatacacgccccagaaccgggctgccctcagagctgggcgcgtgggccctggatggatgcgtcagtgcttcagaaggtcctgttctgacttccttccacccatggggtgaagtggccgtggggtaatgggaaatgcccacccccagcctgcaccactcctctctctctctagaccttgctctggaatcctgggaccccggaattccctgcccagagaggcctaagcacgcttccagaggctgcatgggcctcgtccccacatccaccctcctgagggtaggctatgcacccctggctccagggaaggccaagcggtagctattttgcaggtgtggagatgaagattgaatggagtgggtcaaaggacagggtgaggagagaatggggcagggggtgggggagggtagctggggaggggcactcttctgtgttgccgcactgcagaacagaataagatgtctgagatttccaaactttttttttttttttaataccgagtctcgctctgttgcccaggctggagtgcagtggcgtaatctcagctcactgcaagctccgcctcccgggttcaagcgattctcctgcctcagcctcccagtagctgagactacaggcgtgtgccaccacacccggctaatttttatatttttggtagagacagggttttaccatgttggccaggctggtcttgaactcctgacctcaagtggtctgcctgccttggctgcctaaagtgctaggattacaggcgtgagccaccacgcccagcctgagatttctaaacttgaacctggccttccagatcgttgtaagggtatatctgtcaaggcaggaggatagaacatatttaacggttcattagcttgatgaataatgttagcatatgcaaacatatggtatttgggcttccttctgcactctggtccggttcctgcaaatgtctgtggtgggcagtaggtgggggcgtgtgcggggagataggagggggcaagggatgcattggtgagcttctgatggggagttttgctacagggatgaatgcctgcagcccactggtgacattcttttgcaaacaggaccaggaggttcgtgcgtccaggaaaaatactttcacagacctttactcaaagtgaacctgctccagttgaaaaataaagtaaaactggccgggtgcagtggctcacatctgtaattgcagcatgttgggaggctgaggtgggtggattgcctgaggtcaggagttcgagaccagcctggccaacatggtgaaaccccagctctactaaaaatacaacaatcagctgggtgtggtggccagcgcctgtaatcccagctgctcaggaggctgaggcaagagaatggtttgaacctgggaggcggaggttgtagtgggccaagatcgcaccactgcactccagcctgggtgacagagtgatactctatcaaaaaaaaaaaaaaaaaaaaaagaaaagtaaattaaaacgggtgcaagtccctattctgtatgcttgttttgcagagagaccaagagactgaatcagacgtcaaactgcctccgcattgtcctcagggatacacaggctgtaattagcatcccctgcagtggggctggtagctctgggtgacccatccctaccggaggcatctgaggccatggctccctgtggggcagagcctgaccccagaagggcaaggccagatgggcaggaggaagggcggctcctcccagccttccccaagcttgctgggatacggactcaccatcatccagcgtccgctccaggatgggagggtggctggggctgccgtccccgatgcgtgtgaaggccagcacctggacttcatagagcacgtatttgcccaagccggtgagctgggcactgcgagacgagttgccttccaccagccagaatcggggctgggtgtccgagtccttctccttatacatcacctgtcagggcccagcacagggtgagggcctcaggcctgcatctcacccatctacacttttcccgagtctcatccccaggatgagcagctgtgtgtcacacatctcccaacttccagaccagggctggaccatgtggctaggcacagctttaaaaggaattctaaaagataatgaaaagcaaaactgggtccaacagagctgagtgaggctgggggcatccagcgtggcctcccgggagagatggagcagccctaggccctgggtcctttctgggtgcctcctcacccacaagggatgactcatggttgccatggtgaccattggctaggacgccaggcagatcccctgtatccactctaggaggcagagacctagagggtgataaggacaaggccccttggatggagaggctggaggggccagtgtagggaccccacctcctgggatcccgggactcaccttatagcccagcacgagcccgttgcgatcagcctcggggacctcgctccagcgcaccagcatgctgctggaggtggtggccagtgcagacacattggtggggccggaagagggaactgtgggggaaagggagtggagagaaggcactcaggacccaacgttgactgtgcaagggaagtggaccaggacagggggccgagggaggggccagctcgatgttgcctctctatggaagaaacgtggcacacatggtccccaaactgcaaacaatcccactaagatggcctttggttttggaatgctgcagatgccgtttccggtttcagatgagcctcctcacaggattctctgctcaggttaggattagatgagcttgcatttcctgctagcacagcagagagggctggcagagggaccagggtggcccaggagagctgtctgtcatttaaagggtgccaggaaaaagccacagagcagtgaaccatgtgtggatggatgagagttgcctgaatgctgggctcacattctgtgggtcacccctgggcaggcccccaggagcttccggtagtgattctggaatgtcctgagagctaaccctttcctcgacccctccactgtggtctttcaggcaccactgggtttcagggttaaagctgagggcaggagagtgggcagtatgaatggtggagcctacccagctgtcctccagaggcagggatacccccgccccccttgggaatatgggaatagcaggcacagttgcagagaagtggcaggtgctgggagaggcggcaacatcattgtgacattgagcataagcagaggaaatgagctcaggctgtttttgaacaacaccttcagcctggcacgcgcttggatgaccctgagggcatagagaccaaggaggggacaggcagcagggtggctgggtgtgaggggttggtacctgactcccgggtcctgcccaccaccgtctggctccagggcccgctcccgatggcgttgaaggcctggacctggacgcggtactctgtccactcctccaggtcctcgatggtgtagtcccgctccacacggtcctgcaccacgtggctcagcgtcttgccatgcccgtctgaccggctgtacttgatcttatagcccacggactcagggttcccattgtattccatctccgggagaggctgcagcggggcaggggtggcaaagctgctatgagccaggccccccactgtgcagggaggaactgccctgctaccctctcctccagggcgccttcagggctatccatcccactgtcacccggtcagtgtccacatgaggctctctcacccgagtgtggcttaggttgtgtgactgtgtttctgatgggctcttatcttcctgcagggaggacagagaagcagcatcctttctttattgtgtatgtgacaaatctattaccctgccaagggagtcaggagccacaaaggctgtgtgtctgacacaccgatagcaccgccacctttggctctgctgtctctgctgcttacctctgtcactcaggctgccagcacacacttaattgcctaccgcacctggtctcagctcatgcctgcctttgagtgagcatgggcagagagcaggatgagtggggcacctgccagtcaggaagtccttctgtccagcaaacctcagcctctcctgctgcattttcagcctcctttttcttttcttttttttttttaagacagggtctggctctgtctctcaggctgcagtgccatggtgctgtctcagctcactgcaacctctacctcctgggctcaagcaatctcttgctgggactataggcgtgtgccactatgcctgctaagttttgtagagacgaggtttcgccatgttgatctcaaactcctcagctcaagtcatctgctcgcctcggcctcccaaagtgctgggattacaagccaccacgcccaaccagcctcctccttcttgtttgagtctcacagaaaagaaaagtcagatttctttggggccttaggactaggctgatggggctgtggtcaccagcttaaggttgtgtggatgaccatgggcagtgctggtgagagtggaggtgtgcacacagggaggggagcccagggcctggcctccactactctgaagggcacagagctggggtgggggcatctccagccctcacctcccccagttctgcttccccaggggctctggagggcccttggtccacaggctcaccctaggctgacccactttaccccactcctcaccttcggccccaacctcccctgctcactacacgcttcctccctcctgcagacacttagtgaagccgaccaaagaccattaagatagcaatcgatggtcctgagagccggagatggggcttaagtgcaagttcctttacctgctgaggaaaggtaatggaccacgcaccattaagcgtgggcctgagaagtgtctagggccctgtgccacatggcagctgcctttctattcccccatgcagtccctgccctccgcatcaggctctaaccttttagtagctgcaaaccttaaagtgagattcaggaaggaagcagggagccagcctggggtggggatgcctgggagcaaagaggcaggaggtgggtatagtcacactgtgcacggggcactgaggtgggccgagacagctctgcagctctgctcaggcaccagccactctgggaagggaactgcaatcaataactcatatttatcgaggactgacggcgccaagcgctttcatggccgctagcatcaagctgtccgcgcacaggaacggcaataatgacttcacagtgtggtgtgtttgcaagttgtgttttgcacaatgagtgagatcttacgtggaaacaaagggtttgtgtggtcagatgggcctggggaagcagggtcaagagggctcctgctatgctagtgttcctggattctctatggagctgtggtatgtggtgctgttcccacatttatttgtctaagaattcttgtttgctccacacgcctcctgggattgctgctctgtgggacacgtgctgggaaacgatgttccagagggcctggtggggagaagtggcctgttctccagaggatgagacggcagtgtgcccgatggttagggctgtggacttgcgggtaaagattccccgggttgggacctcagccctgctgttcatgaaagcacgtgggaggatacgggagaacttgggcgagtgatctgacctctcttctgccccggtttcctcatctgcaaaagggggaccaggatcactctgctgtcacaggcttgttgtcagaacagcgcctggtaggagaggaagcctcggtgtgttactgtcactacctcgtgcaggatggcccacggtcaggaccctcaacacacagcccggatctggggacactctctgaatgccacagtggcacttgaaccccagacccgccgcttgggagctgtgtggctgtgggcaagttcttaacctctctgagcctcagttttcttagctgtaaattgggatgatcatgtatcctttgtaagattattgggagaatcaaatgggatgaaaatttaaaatgcttgccacttggcgatgctcagtaaacagtatttttgagctccttcctctcatcggcgggcgggggggcatttgttcgttgggctaagatgttgattatcaggcatctcatcagaaaacagaaagagaggagaaaggagctgtaggaattctgatgtgcaccttctaggaggcaatgaccagaagctcatggagaggtcccacccctgccctcgagggagccttaccatccagcgcagccacaggctggtctcactggctgtgcgcagagacacattggctggggccatgtcagggggtgcctgcagggtctggatctttctagaaggctgactgggggggctggtgcccacgatgttcacctggcgcatgcggaagctggggttggggagagatgagcaagatggtaagggcagctcacccaactctcaaccctgtcctggtctgggccatagcccccacccacccccagccctgaggctgctgccttctccccgggccagtctcattacctgtagcaggtgaaggggttgaggtcgggcacctccatggagcgggcatcgggctcattggagagctggtggatcagcaaccactcctctccctccccaaccacgcctacctggaaaagggcaggatcttaggcctgtccagcctacagggcccacacggggtgctccgagccccagtacaagccctgccagggaagaagttggttcagaacccagggctcatctggagggcaccatatggggctaccatctttccaggcccctaaacatgactgcaagtgtgactcaaccctcctgccttagaatctctcaggatgcttgtgatcaatatattcctggattctggagtcagaatgagtttaaatctaactccactacttacagaatccctcgagtgctgcccaggaatctgtgcttttaacaagcagcccaggtgattctcttgaacaccccgggtacttccagagacccaggctgcccctcaaatcagctaaatcagaatcagagtttctggggtaggggcacaggtgttggcgcttctgaacgctcccctgatgattccagggtacagccaaggcggatatttttatattccagcaactgggtatttttctaggcaccccccgacccaggaggggactgtagtgtgtgtgtgtttttccatgtacacaggtgaggggcagggggagttggagacaacattggcaagtgtgagcatttggagtataatgggccattgagagctgcacatgaaaattcacacaggccgaaatacacataagattttgcactcaagggcacggggtgccctggcgggggctgctggtcaggccccaggcctgccctacctgggcttccaccagccagcgggagatggaggttttcccatcgtagcctggcctgaactgcaaggtcacagagcgggggccgatgttggaaatgcccaggttggtggggggccctgggagttctggaaaaggagaacagggtggggaaggagatccggtgagaatggccccccatgttgaacgggactgttgggcatggagggggctgtgtgtcacgcttttcctggaaatgtctgaggagaagcacagccacggccccactccacccacagtctttgttcctgtgtcttacggagaaccatgttcatgccaggaggctgagacagagttgggggtcaaaggggatctcctagggctgagaggaggctctcagggccaggaaacaggggccgggatgccgccttcttcctggcagttctggatgtgagtgaggtaatcataaggcagctaaaagctgcattaaaaccaagctgtgctgagaaagaaaccaaacgggaccgatcctcccttccatccgcccagacccctgcacacctcctacgcctaattacagctcaggaaggtgagaggatgggtggggacagggggaagcttattttctggccaggaatcctggggctcttggagctcaggaacaacagaaagaacacagattctggagtcagaatgagtttaaatctaactccactacttacaggctgtgtgtctttgcacaagttatccaactctctgtgcctccatgtcctccttggtaatgaagaggataatagcaacacctccctcagggttgttgtgaggattaaatgagtcaacgtgagcaaagctcccagcaccatgccccgtgaacactacatacctatttgccagcatggctgtaattatcactgggctttggctgagactcaggcagcccagccatctacgcagcaggtggagggatgctggcaggtcaaacaagcactgcctgactgatctggatgggaccacatggttatctggtccaacttcccatatatacagatggggaaactgaggcacagaggggacacagaacttgctcaaggttgtagggcttggcagaagcagagctgagagtggacctcggcttgctctctgtgccaggcctaggagtagccccaccgtgctctgccacctcccaaccaacccttccacacgctggaatccaaggtggaccctctgggcgacagtgggaaattttcccctgaatcacagataccattgcctggtgtggaatctggtgagaaatgggtgaagggagggactggtggggaaatgagacaaggcagggggcctctgcttttctgagagctgtgggaggatgcagcagggagccaggggagcccctgtccagagacctgggatcccagggattccgcctgctctgaggggacccagacccacacagcacaagggaaggggagagcctgtgggaagaacgctggtattcctgaaagacaaggggcctctttttatttttttttttgagacgcgatgtggccctgtcacccagactggagtgcagtggtgtgatctcggctcgctgcaacctctacctcctgggttcaagcgatcttccatcctcagcctcccaactaactgggatcacaagcatgcaccaccacagctggctaatttttgtatttttagtagggttttaccacgttggccaggctggtctcgaactcctgacctcaagtgatacgcctgcctcagcctcccaaggtgctgggactacaggcatgagccaccacgcccagccgacaaggggcctcttgaatgggacgctgctcaggagaactcaaagagtcctgccttgagagtgggcacttacctgggggcaccccagaggagatggtggaggcggacacttggccctggccctttgaggtcatggcggccacctcgatggtgtaggtggtgagcgcggtgaggcccgtgacacggtactccagggtcacgttgggcaggtagtgggtcacacgggtgttggttcgattgtactcctcccaggagatccggtaccctggggagagccgccgtgttggcatgagcttggctgtgatcacaagttggcctgacccactactccacttctcacttctccactaggctggcaattagatccacgctgggagcaatggggccaagggaggtgggagctgttggcatcatgccctgggtctcaggtgtcgcctcagtgggatgccagcactttagggaattgcaggggacatagtgagtcatcatggcagccactgagatctgtggcagaaggtgtggggctgcagactctgggatgtgttatgaagtggaggtgccaagagcctcctgtgagtggtttctaagaaagcatgggttggcttcaagagtttgggtgaaaagtagctcaaaggcaggggatggaccagctctgacctttcccagccctgtcctgccctctggttcagaaacactgcagtgcctacctgtgaggatgccatttttctctcccggctcttgccagctgaccttcagcgatgtgtccaggatctcactgaagctcaggtgtcccacgggcccaggcactgcaccccaaaaggaacccccaccccccaaggccagttagagccagagagagaccaccatctgtgagatagcctgtggtaatctgggggtatctcagcctgggagacaagcctgggccacccttctgcctggggcgcccagcctggccttgggcgggggggggcagaaagagcagggctggggggtgcctaccatcctcatgggtgcgcaccagctgcggggtgctgcgtggcccgtccccgggggtggtgaaacacagcactgaggtgaagtactcggtgaacttcttcaggccagacacgaagcccacgtggatgctgtcttgaaagttaggccgggcggtcaccatggtaacctcctcttcctgttccggctcccaggcgatcagctgcggagaggcgagcaagtcacacagggcagcaggaaggttccagaggaggccaagccctctcccacaggctgggccaatcaacagatggtgtccggggaccggagtccctgtggtgcctcctccgagggaagggacaggcagtgcagggaacctgcggggtactggggttcactttggggcgcttctccacttcttgagccactgactttatgcaaagcaccgtgctgggtgcttcccaggaatcgcctcgtactcaattctcacagagacccaggagggaggcatttcaccaggaacagctgcataatttgcaggctcagtgcaaaatgaaaaatttagcccttgttcaaaaacgactaagaattttaagatgatagcatcagagcatttaactaagtgtggggtccttccaaacgtggggccctggacgactgcacaggtggcacacccatgaagccggccctgtattccttttttgagatggggtctcactatgctgtccaggctggagtacagcggcatgatcacagctcactgcagcctcaacctcctgggctaaagcagtcctcccacctcagcctcccaaagtgctgggattataggtgtaagccactatgctcggcccagccctgtattttattttattatttatttatttatttttattttttgagacagagtcttactttgtcgcccaggctgcagtacagtggcaagatctaggctcactgcaacctctgcctcccgggttcaagtgattctcctgtctcagcctccagagtagatgggattacagacatgcaccaccatgcccggctaatttttgtatttttagtagagatgggggtttcaccatgttggccaggctggtctcgaactcctgatctcaagtgatccgcccgcctcggcctcccaaagtgctgggattacaggcatgagccgctgtgcccagcccaaccctgtattttacagatgaggaaactgaggctcaaagaggctcacacaggtagggggaagctggttctgggattccaagccctgagctcctacatcttgccccatgtgagctggggcagcttcgtctttggagctctccaagggttacttcctacagagctgggaacttcagtttgtgggtaactattatcctcttacactccttctaagttgggatttccatcttaaatatcaagtagaggcggggcatcggcaagaaagtcccatctggaaatccctcaagttcttgctcatctcccctctgcagatcacacctggcccccgccccctcccgcctgtctcgcctcctgctctcacctcacgctcctgtttctaggcccttcatctgtctccaataatgacagctggtttcagagatttcctcatttatttgaagttgattaaatagcaattaatggtgaaaagcaacacttgatgagttttaataagcacgggtatttatagatataaaacaataccacgccaatgtctcccggttaactcatgcctataacaatgcttaatcttctccttttcatggctgtgtatttataaaggatgttttgaaatttaattggtattgtgaaaagatagcctatagcaagttaattagacactaattagaccctcaaaatactaaacagaaatactaagtggcatttaataagtgtgttaaatatcctccgtatttcgattatcttgtttcatagcaattatgttgccgaacttctttggagtagattaagaaacaagtttaatgttttaatttaatttaattaatgtacattcaaattaattatgctgttagaattaattgtgtggtgtgttccccagcaagtataaaatctgggtaaatattatcttcctgggcttaggccaattataagctctaccattttttttaaataaaggaaaaagggtgtctttacatgtgccttaaaacaatatcactgggccttacccacaaaaatgacccagaggaagtgcacagggtaatggcagtgtggtttgtggagtcacgctcttgacttcattatcctacagcttgacgcctggatccaagatggcagcagggtcatgggttcctgtggctgtttcaaaatatttactctgggatgtgagccacttgtccttctccagttgcacgtggagaggaggaggcttggggataggaggcctccctgcctcaggtccagggagagagacagtaaaattgccttttgtgtccttcattgccctaaagggattgggctctgggcagccgtgggatggaacttcagtgctcagctcaacacacaacagggcttccacctgttgaactcttaccgtgtgcctggccttatttaatcatcacgatgaggagcagatggaaatcattgtcctatgctattacagaaaaggaaactgaggttcaggaaggttaaggagcttgcacatggacctactaagagctggctcagtttgtggaccctgagacctttcatgatgacctctgtctctcaaaggtacacagagctgctgagatgagtgttctttaggacatctctgtgccttctccttgttagtcagtttcagtgttgatttaccatactaggtccttagtctcaggttctaagtagacggggctcccctgagaaggctcgggtgtgttctggggaacgagcattagacctgagttcctgggatatgaaattcccccttagagagcagaggcccagggaggcaagccttgtaactgagcagcagtgctgctgatggagggtgttgggggagggcagccttgcagctggcacacttgaacctgaacccagctctgtcacttactgtgggactcacggaaagtcacttgaccactctgagcctcaggctattctaggggatagaaacagctgccttgctgggtttcagggaggagcaggtgaaatgtctcctgtccctggtggaggcagtactctacagggttgaaggtgtaggatgatgtatatggcatctagctactaaagttagaaaataaaagttaggctgggcatggtggcttacgcctgtaatcccagcaattggggaggccaatgtgggtgaatcacgaggtcaggagttcgagaccagcttggctaacatgtgaaaccccgtctctactaaaaatacaaaaattagccgcacatggtggctggcgcctgtaatcccagctactctggaggccgaggcaggagaattgcttgaaactggaaggcagaggttgcagcgagccaagattgcgacactgcactccagcctgggcaaaagaacaaaactccttctcaaaaaaaaaaaaaaacaaacaaaaaaccatatatatatatatatatatatatatatatatatatatatatatatatataaagatcgagaatgtggaaagtacattgtcacttatctgagaaggagagcatacacatttatgtatgcatgtacagcaaatcattggtattcatgtgggattggttccaggaccgcccgcagataccaaaagccacagctgctcaagtacctgatataaaaaggtgtagtatttgcatgtaacctacacacctcctcttatatatcttttttttttttttgagacagagtctcgctctgtcgcccaggctggagtgcagtggcgcgatctccgctcactgcaagctccgcctctcgggttcacgccattctcctgcctcagcctcccgagttgctgggactacaggcgcctgccaccacgcccggctaattttttttttgcatttttagtagaaacggggtttcactgtgttagccaggatggtctcgatttcctgacctcgtgatccgcctgccttggcctcccaaagtgctgggattacaggcatgagccaccgtgcccggcccctcctcttatatatcttaaatcacctttagattattgtaatacataacacaatataaatgctatgtaaatagttgttatactgtattgtttgggggaataatgacaaaaaactctgtgcatgtttaatatagatgcatttttgtctgaatattttcagaaccttatgagattggctgaatccacagatgtggaatccatggctaagaagggcctactacactctttttttttttttttgagatggagtctcgctctgttgcctaggctagggtgcagtggcgagatctccgctcactgcaatctctgcctccccagttcaaacgattctcttgcctcagcctcctgaatagctgggattataggcacctgccatcacgcccagctaatttttttttttgtatttttaatggagatgggatttcactatgttggccatggtggtcttgaactcctgatctcaaatgatctgcccgcctcggccttccaaagtgttggaattacaggcgtgagccaccgcgcctggcctgtacttgtttatattaaaaaaatggaagaaaaaaccaaaccaagaaaacagaaagcaatcagacctataggggagtgagaggacaaggattgaagctgattttctctgaatttgctttgtggatttgactttattatgtaaatattcaacgtaattatagaataaaattaaattaaaaaatcaatccctaaaaatcaaaaccacaatgaagcaaatgaactaatagagtattgagctgtggtaaaattacagagagaaatgacttcaaaagacttagcaatgcagtgcgaagtccatccctagagggatatacctcaggaacaagaagaatggcaataattggaaactacgttcagtaatcatagtgtggatatgactattctgaaactgttgtgtgtgtttgtgggaataacgtaggtgggtaaaatgctggtattgtaggaactggattttcagtatggacaaaagaccaatgagattattaaagagtctgtcatcatgaaatggaattgaaagtgtgagtatctatagtatcttaaaaaatattgtttagctagccattaacagggcctagaaacaacaaccatttctggaataaatgcaatgcaagtgctaaaactgtggtatctaactatcatttctcactgaaagcaacaagagccccttaaagaaatggccgatgcctggcacagtgaggggaatgtatatataatagtctggaacatcttgtcataccaaattgcaaggaagctatcagagactactggggccacgtcaagagggctcaccatcaagtcgaagaggccaatgatgggtccatttgtaccactgaactggcagcacccagtaccatttaagaagcataataatggtaatggattgaaacatgtcagatttgtaaaacaaaaaacaaaacaaaaaaaatccttggttatctaataatactaccaaacccaaaacaaaacagaaagacgtccccctccaacccaagctcatctgttacctgataagacaataaggaatcaatttagtctttattttttctgttttttagaaatagagatagcgggggcgggggagtctcactatattgcctaggctggtcttgaactcctggcctcaagcaagcctctgcctcatcctcccaaagtgttgggattacaggtgtgatacaccatgcccggccagaaccaattcattatacgaaaaatttggtaagtaaggaaaaataattaaatgcttaccctgcttttcctagataaactgaaacttcaggtaaccaaaaagttgataaagggaaaattcttgtttttgaaagcatttcagctactaagtcaagaagaaatgataatatttgcctatccccatattataacccttattgaaatgatagctcatagatgactgtcagtggttgacttcacagtaagagagacagccggactttgtgctttctgatcaaaatacataacaccatctaggaagtaaaatatttcctttttttttttttttttcttttgagacagagtctggctctgtcgcctagactggagtacaatggtgtgatctctgctcactgcaacccctgcctcaagaattcaagcaattcttctgcctcagcctcccgagtagctgagattagaggcatgtaccactacacctggctaatttttttttttttttttgagatggagtctcgctctgtcacccaggctggagtgcagtggtgcgatctcagctcacggcaacctctgcctcccgggttcacgcctttctcctgcctcagcctcccgagtagctgggactacaggtgcctgccactgcgcctggctatttttttttttttaatatttttagtagagacggggtttcaccgtgttagccaggatggtctcgatctcctgacctcgtgatccacctgccttggcctcccaaagtgttgggattacaggcgtgagccatcacaccccgaagtaaaatatttcaaataacaaaaaatcaaacctgaatcagattagcctctagctttaagttacaattcattgtaactatattgtttggaggaatgcattgaatgaccccacagggatgcaatcagcgaaatccagactgtggaaaattctgttggacaaatgactaagtttcttcccaaataaattacaagaaagagaaagggagagagaaagagagagagagaaagaatctatagatcgactgagacctaaaaaaaacccctcaactgactgcaattgtgtgaacttcatttagatcctgaagcaaataaaaccacgagtaacagattatgcggcaatcaagagaatttgaaggctgactggatatctgatgatattacagggcctgctgatatttttagctatcataatgataatgcagttactgtggttttattttaaatagagatctcatctatactgtttctttccagaaacattcatggatgaactgatacaatgcctggaatttgcttcaaaatgttccaagggaaaggcagagggttggggcagagatggaacatacctggctgggagttgggcattgttaaagctgggaatggggatacaggtgttcactgcagtctttcctctacttgggtggatgtttgaaaattttcacaattaaaagggggcagccgggtgtggtggctcacgcctataatgccagcactttgggaggccaaggtgggtggatcatttgaggtcaggagtttgaggccagcctggtcaatgtggtgaaaccccatgtctactaaaaatacaaaaatgagccgggcatggtggcatatgcctgtagttccagctactcgggaggctgaggtaggagaatcacttgagcccaggaggcggaggttgcagtgagccgagatccaacctgggtgaccgagcaagactctgtcttaaaaaaaaaaaattagctgagcatggtggcacatgcccctgtaatcccagctacttgggaggctgaggcacaagaatcgcttgaacccgggaggcagaggttgcggtgagctgagattgcgccattgcattctagcccgggcaataagagcaaaactccatctcaaaaaaaaggaagaaaaaaaaaacacaaaaggggaaaaatgctcattcttattggaggtatacaagggacaaacactgcttttttctccttgtgatatgctgaaggctaaagaagcagaggaaaaaaatctctgctgcttttattcattggtattgaaaatgttatctacaattaaaaataatacattctctctctctctctgtgtctgtctgtctgtctctgtctctctctttctttttttgacacagggtctcactctgtcactcgggctggagtgcagtgacgtgatttcagctcactgtagccttgaatcgtggtctcaaacaatcctccctgtcttagcctcctgagtagctgtgatcacaggcactcaacaccacacctgactaacttttttgtgtgtgtaaagatggagtcttgccatattgcccaggctggtctcaaactcctgggctcaagagatccccctgtcttggcctcccaaagtgttgcgattccaggcgtgagccacggtgcccagcctgacatttctttttaatgtaaggaaaagtgaaggctctggtttgaatctgagctttgcatgaccttgacactgtgtttgaccttgaacaagtaacttccctctggtgcctcagtttctttctctgtaaaatggtgtgatggtaatattcctttttgtttttgtttgtttgtttgttttgagacagagtctagctctgtctccctgactggagcgaagtggcgtgatctcagctcactgcaatgtccgcctcctgggttcaagcgattctcctgcctcggcctcctatgtctgtagctgggattagagatgtgtgtcaccacacctggctaatttttgtattttcagtagagacaaggtttcaccatattggccaggctgttttcaaactctcgacctcaagtgatctcctgcctcgacctcccaaagtgctaggattccaggcatgagccaccacccccggccgataatgctgcttcttagagtccctgtgctgcttgcatgaaagataaatgtgagcgaagcatttagtgtactgcctggcccagagaaagggccctgtaagtgtgaggtctccttactcctccaccagtttctgtgctcaaaacgtctgggcaattcactcctgctgacctttatcgagtagctactgggggctgggcactgactggacctgggaattcagtggcctctgccacctcctcttgctctgggtcaccatgggccactgccctaattgtcctggccatgggctggccttcctggccctcgggggagctgtttgccttaaaagtttgtagctcagccctcccatatgtagaataaaacttgtgcttagaattggtagcaagaagctaattgttcccagttcagctcctctgctcttcagcaatgccggcctccccttccttcctctgcctccccccagggtcccaattaggagagttttccggcagcgagtgctccaagaattcagctgctgctccctgccctgcaaagctctgctcgaccttgggttcactgccttcctgggattgagagggccaaggccggagtgaagctgggtcatttccagttctggaccatccctcctttgtttgcttgcaacactagcagaaactcctcttcattatttcatcccagtcccttcttgtccagcctcccccactttggaggaagaaccgctaaggcagcgagtcctagaattaatcttagttgtggcaagcacagtgcagaggggtgcaggaaccttcgggatgtgtcagtggtcacctcgaggtcatgcgttccctggactgaagctcagggcctgcagtgctctccgcttcacagctggcctcccctcaaatgctctgcctcccctcccacatctggagggagtggacggcatccttccgtctgccccacgttgctgggggcaggtcctacccctttaaaacatagtgtggatcccccatgctgtgctctgtctttagtcctccgtggggaggacaggcacggggcccacatggaatgacacgagagaaccgggcctgggctctgaggtctgtgttccaggatgggaggactgagaagtcctgacctttagctcagttggaaggagagcaaatgtactactactactattattactgctattttttttttttttttggtcagagtctcgctggagtgtagtggcagaatctcagctcactgcaacttccgccttccaggttcaagcaattcccctgcctcagtctcccgagtagctgggactacaggcatgcgccaccatgcccagttaatttttgtgtgtttgtgtatatatatatatacgtatatatatatctacgtatatatatacacacatatatatgtagatatacgtatatgtatatatacgtatatatatgtatatacgtatatgtatatatacgtatatatgtatatgtatatatacgtatatatgtatacgtatatatgtatacgtatatatgtgtatgtgtatatgtatatatacgtatatatgtatatacacatatatgtatatgcacatacacacatatacatatatgtatatgcatatacacatatacatatatacatatatcctggaacatatacatatacatatatatatgtgtgtgtgtgtatatatatatgtgtgtatatatatatatttttagtagagatgggatttcaccatgttggccaggctggtcttgaactcccaacctcaggtaatccacccacctcagactcccaaagtacaaggattacaggcatgagccaccatgcctggtctactgctattattactattattatctgttatgggctgagttgtgtctgcaaaatctgtatgtttaaattctaacccctagcaccccagaatgtgactgtatttggagacagaattgttaaagaggtagttaaatgaggtcattagtgtgggccctaatccaatgtgactgaggtccctataagaagaggacatttaggccaggcgcggtggctcatgccagtaatcccagcactctgggaggccgaggcagtcgaattacttgaggttgggagtctgagaccagcctggccaacatggtgaaaccccatctctattgaaaatacaaaaaaattagccagacatggtggcacatgcctacagtcccagctactcgggaggctgaggcaagagaattgcttgaacatgggaggtggaggttgcagtgagccaagatctctttggacacagacacagagtgaagacagacacctagaagtcaaggagagaggcctcagaggaaaccaaccctgcccacacagtaatcccgtacttctaatccccagaactgtgcaaaaataaatttctgttgtttaagccagggttccccaatcccccacggaccaccaggtaccagtctgtggtctgttaggaaccaggctgcacagcaggaggtgagcggcaggcaagaaagtgaagcttcatctgtacttacagctgctccccagtgctcacattaccacctaaactccacctcccatcagtggcagcattcgattctcacaggagcgtgaaccctgctgtgaactgtggatgtgagggatctaggttgcgtactccttatgagaatctaatgcctgatgatctgtcactgtctcccatcacccccagatcggaccatctagttgcaggaaaacaagctcagggctcccatggattctacattgtggtgagttgtatagttatttcattatatactacaatgtgatagtaacagaaataaagtgcacaataatgtcatgtgcttgaatcatcccgaaaccatccctcctcccaccccaatccatggaaaaattgtcttccatgaaactggtccctggtgccaaaaagtttggggactgttgctttaagcaatccagtctgtggtacttggttatagcagcccaaatgcatttctacgaccactaaaatcactttccaagtggttatcatgtgtttgtcattgtgctgaacaaattagaaatattatctcacttaatcctcacacaactccaagaagcaggtattatcatcttcatttgcaaatgagaaaactgagtttattttagttattcagcggtgcgagcagtgcatagagtagctgctcaataaatattgattgaaggacagaagctgagacatattaaagaacatgcgcaggttgccagcaagaggcaaagctgggactttaaccaccaagtctgtctgagtcctaatcctgtgccattaaccacacactacgtggagtcgagtacagcctggggatacgtttgagcatgaagcccacaagagccacggtaagaagtgaatggtggatttttctcatggggccatggctataccaggtgtttctttttcttctttttctctctctcttctttttttttttttgggacagagtttcattctgtggcccagggtgtagtgcaatggctgcaatctcggctcactgcaacctccgcctcccaggttcaagtgattctcctgcctcagcctcccgagtagctgggattacaggcgcccctgccaccaagcccagctaatttttgtatttttagtagagacggagtttcaccatgttggccaggctggtcttgaacttctgacctcaggtgagctgcccgcctcagcctcccaaattggggattacagatgtgagccactgtgcccggcccctacaccaggtgtttctgagcctgaaataacctgggttttgtgtataacccagtctcgctgggaaggaccgtagcactgagtgtcagtcagggcagtgtctgcacttcctgtggcccacatgtagccttggggaaggcctggaactcttttcctctaatgtgtgtccctagcttgactcgagccaatgacttcagaaacagaggggggatttcctcctgcccactctgtcccctctccccaccccctccagaagatcttagggcctcctcttgggtgaggagatgcctcatgtaccttgtagccctggttgatgccgttgatgaactgggggctgggggcgttccaggtgaagcggatggtcgtggaattggtggcttccgcgtgcacattgcccggagggaccgtgggaactagaggagatgagagaacggggtggggtggagggggcccagtcagtctctcttgcccagttcagtagagaaaacgcaggggtgggggctatagcctctgccttgcacccccctaccccaccccaactcctccctcgctgtgtagacttaagaggccttcatattctctctggattagtttgcgtttaataaaacttgcctgacccacctcacagggtactggtaaataagaggggtgcggatgaaaaatgctctggcatggttttcaggtggaatgctaaaagtaagctgtttcatgatctacttaacatgaaattcacagaaggtccccatatgcctggagcctctgcccttcaccatgtccaagccagcctcctcttcctcttcccctcagtcctcccaccctgtggggtagattggcctggggtggtgattccagccccagggtgcaatagtaggggcctggtgagaacaggccacacagccaaggctctcgggcctggacaggcacagaacccaacaggcatgggactgggagaaggggaagcacctgctcctctgaggccatagtctcttttcatttcatttcacttttttttttttttttttttgagacagagtctcactttgtcacctaggctgaagtgcagtggcacgatctcagctcattgcagccttaacttccccaggctccagccttggggacctcccgagtagctgggaccacaggcatgtaccaccacaccaagctagttctgttcattttttgtagagacagggtctcactatgttgcctaggttagcctcaaactcctgggcccaagcgatccacctgccatagcctcctgagtagctgtgccactgtagcatgtagcatgccaccacacccagataatttttttcactttttgtagagatggagtctccctatgttgcccaggctggcttaaaactcctgggcttgagcaatcctcccgtcttggcgtcccaaagtgctaggattacacgcatgagccaccgcgcctggtctgagaccacagtctctacctacctccctgcagcgtccactcggtgactttactgctgtagacccccagcccagcgctgttgtaagcagccacctcgatctcgtagttggtccaaatgatgagatcctccagcagcaggttgttcacatcagcatccgtgatgttcttaaactggtaccccacgggcagcccggccaggcagtacctgaggggaagaggcgaggcacagtggagtcagagtcagcttccttggcctcgtacccaggaaattgtccagagcagcgctgtccaataggacttccggtggtggcggaagtgctctgcacctgtgctgtccgacagggtgcccgccagcacatgcagctgctgagcacttgaaatgtggttagtgcaaccgaagaaatgaattcaatttttttttttttttgagacggagtcttgttctgtcacccaggctggagcgcagtggcgcaatctcggctcactgcaacctctgcctcccagattcaagtgattctcctgcctcagcctccctgagtagctgggattacaggcatgtgccaccacactggctaatttttgtatttttagtagagacagggtttcaccatgttggccaggatggtctcgaactcctgacctcaggtgatctgcctacctcacttcagcctcccaaagtgctgggattatagcatgagccactatacctggcctgaattagaatttgttttagttttgcttatagttgacccttgaacaacacaggttggaactgtacaggttggcgtacacacagaactattattttattttatttttttagatggagtctcgctctttcacccaggctggagtgctatggcatgatcttggctcactgcaacctccacctgccaggttcaagcaattctcctgcctcagcctcccaagtagctgggactacaggcatgcgctcccatgcctggcttattttttgtatttttagtagagatggggtttcactatgctggccaggctggtctcgaactcctgacctcgtgatccacctgcctcagcctcccaaagtgctgggattataggcgtgagccaccatgcccagctacacagagttttaaaaataaacatatcagaaaaagttttagagatttgtgacaatttgaaaaaactcgcagatgaatcacatggcctagaaacattgaaaaaattaagaaaaagttatatcataaatgcataaaaatatacgtgttaatcgactggttataggtgtggcttctggctagcagtaggctattagtatttaagtttttggggagtcaaaaattatatgtggattgggccgggcatggtggctcgtacctataatcccagtgctttgggaggcccaggcaggtggatcacttgaggtcaggagttcgagaccagcctggccaaaaagatgaaatcttgtctctactaaaaaaaaaaaaaaattagccggatgtggtggcacatgcctgtagtcccagctactcgggagtctgaggcaggaggatcacttgagcccaggaggtggaggttgcagtgagctgagagtacgccactgcactccagcctgggcaatggagtgagaccctgtctcaaaaaaaaaaaaaagaaaataaattatacatggattatcaaccgtgagggggtgagcacccctagcccccacactgttcaagggtcaactgtaatttaagtaaccagagctagctaatggttaccttactgggtagcagaggtctaggggatgtgtctggactattctatttgatgggggaggattgctaaccaggggcactgagaggtcccagggcagaacttgcaggtctcagccttggaggggtcatggactggagagctgtccctgaagcctgggctcattttctttcctcctctaggatacaaggctccctcttctgaaagttactcgcccaggtggaatgaaacacctgggctacctactcgacccatttctacctccactggcaaaaagaactcacagcactaaagaagtaaatgtgtacaagcaaattttgggggtcagacacaaaggatgggtcattcatttgagaaacacgatgcatatataattcagcatctaattattggaaaattaaggacctcaaagtattctgatgcattacaatgccctaaaacactgcttctctaaacctgaagatgcatcaaagtctcctagatgagttttttttttttttttttgtttttagatggagtctcgcccaggctggagtgcagtggtgcgatcttggctcactgcaacctctgcctcctgggttcaagtgattctcctgcctcagcctcctgagtagctgggactacgggtgtgtgccaccatgcccaggtaatttttgtatttttagtgaagatggggtttcaccatattggccaggattgtctcaatctcctgaccccgtgatccacccgccttggcctcccaaattgctgggattacaggcgtgaaacaccacgcccggcctgaaagatttttttaaaagcaaaggtttctaagcctatccttaaagtttctggtttggtaggtcttggagagacttgataatttgcatttctgaccagttctcaggttaggctgatgccatgggtgctgggaccacactttgagaaccaccgcccttcaggattagtgaaaaacccacaacaaaattaaccaatagtggagcagttaaacccctgtgagggtgtgtacatgcaggaatgagacacacgaagttgcatagcattttgtagccagaatctagaatatcaatgagagttctcagtaacctcagataacttatgaatttgaacttatgaataccacattttagtgacccttaatgactcccatttaggttactagaagagtagtccctcagtcaaatgcaaagataagggtctgtataactgggcttcatttccagtaataaccaaagaaagaactttcacttttccatcaattcttcggccagctggtttctccactcacgggtcaagagaattctggcctgtgatggaatattcgcggcttcccagagcgttgccccttggaaagttacttatttcttctcctgtctccttgtaggcctgttcctatgtcagcccatatagcctcccctctcacgcattcctcgctggtgtccaggggtcttgccactggaagttctactaggtgtccaacctaaatccttcctaccactgagtaggcatttcttgttacctagtccttcctagatggcgaagggcctgccatgaatttgcactgttttccagtccactcccgatcttcccccatgcctttccccttgggactgggctcctgtccccagggtggacacccacctgatgatgtaacccttgagaattccattctggtggctctcaggaggcggctgccactggatcatgatggactggttggttcgaccgctggcgatgacgttctgtggaggggccgtggggggctcctcggggagggagaccctggatcacaaaacaccaatgctcttagtcttggggtcaaacacaggagttgaatgggatatgagaaggctgaaccctggcctgctctgactctggataattcggtacaactgctgtgtgcatctgggcaagttacctgacttctctgagcttgttctataaaagaattataataaagctctacttgcctgccttatgagactagttgaggctcaaatgatactacatatatagtctctgtgtatatgtggatatatgtatatgtcttttaaaaactataaggccagatgctgtggctcatgcctgtaatcccagcactttgggaggctgaggcaagaggattgcttgagggccagagttcaaaaccagcctgggcaacatggcaagaccctgtctctaccaaaaaaaacaacaaaaaaaacccaaaaaaactccctcctggtgacttgcacctgtaatcccaaatacctgggagactgaggtgggaggatggcttgagcccaggaggttgaggctgcagtgagctgtgtttgcatcacggaactacagcctgggaaacagagaccctgtctcaaaaaaaaaaaaaaaattaatgtacatgtttttggtgccgttgagggatgtaagtttcagtttcctatttgtcaaggaagctgctgttggggctgatgaggtcatgagtgtccaagtgttctataagcagaaatgttggtcacatcccactggtcagctgctggtgtaccttaactaggcctcctttgctggccagctgagccccaggcaggagcagggcgggcatggcgtgtgagggagagagccaaggacacccaccctgcctcggggagccaagcgcgacagcacgtctttctctggcattgctgggggatgctgtgttctgcctaagtgtacttttcacatcacggacacgtgtccactccaaacaaaagttaattatttttgatggatgactttccctttttgtttatgtttttgctttttgatggatagctttcctaagcatgctgctcgctcccgtgttttatttgagagagttttgctctttcgcccaggctggaatgcagtggcatgatctcacctcactgcaacctctgcctcccgggttcaagcaattctcctgcctcagcctcaagagtagcgggattatgggtgcctgccaccagggctggctaatttttatatttttagtagagacggggtttcatcatgttggccaggctggttttgaactcctgaccttaggtgatccacctgcctctgcctcccaaagtgctgggattacaggcatgagccactgcacctggcccgctcctgtgtttttgtagaggctggggtaagggtgatttggcctttttcttttttgtttttgaggaaagatttcactcttgtcccccaggctggagtgcggtggcacgatttcacctcactgcaacctccgtctcccgggttcaagcaattctcctgtctcagcctcctgaatagctgggattacaggcacgtgccgccatgcctggctaatttttgtatttttagtagagatggggtttcaccatgttggccaggctggtctcgaactcctgacctcaagtgatccgcccccctcagcctcccaaagtgctgggattacaagcgtgaggatttggcctttttcttggtgactcagggcggtttgcatgaaggtacattaggaaggtgagtcagtgtgatgcggtgcagccgcagggcaggagaagttgcagggtagcttcccctacactttcagcctctctgttgttgggattgtgtatctccagatgcactggggctatgtctgttcattccctgtcctccctccagtggtccaaacgtggcatggcacacggtagctgctcagtaaacagtgagtatgtaaatccccctgtaactgctctccacacgggctgccacctgccactgctccctcccgtgagattgtttgaccccagtggtgctaccttagtacaagccagagagacccaagctcattgcaactgtggcaaaaccaccatgattgatttaagccccaggcgtctttcaaagagccaagtgcaaggctttgcgcacgtgatttgtatcacggttgttctgacctctcccatgacatctttcttgctagaggtggctgcttgttctacggagctggagaggatagaattctccttctacatagatgggtatcaccgtgtgatgtttttatatgaagcatctgcagcttttattcaatttccatcttttttttttttttttttttttgagacagtcttgctctgtcatccaggctggatctcgactcactgcaacctctgcctccctgattcaagggattcttgtgcctcagcctcccgagtagctgggattacaggcgcccaccaccacacccagctaattttcatattttagtagagactgggttttgctatgttggccaggctggtttcgaactcctgacctcaggtgatccgcccgcctcagcctcctgacgtgctgggattacaggtgtgagccaccgtgcccagcaatttccatcattttataaaagctttgcgggaaccctagcagggcctggcgtcgtgcaagacatggatatggagatctgtgtagatcctgtatctctggaattttgcatccatttaacaatgacagcagcccatgcggatgtggagtggaaggaggtgagcctttttgcttgcacagctcccagtaactgggatgactacatttggttggtgctcaccgcgttccccagtgccctactcagagcaccccatttaacctttgcaacatcctggtgaggcactcatcaggattgctctccccttctacagaggcggaagcctagagggggccaggaggagctgagccagaatctgccacatcggtttcggctgcagcccctgcctgttggagtcctggcgacgcccctgtagagcgccagtgccctcacctctcggtgtctttgctgaactgtcctttccccacgtcgttgacggcacaaagacggaactggtaggagcgtgcaggaaccaggcccttgactgtcactgaggtagctttggggtccacactggccaggagtacagtccagggggcatctgcagggacagtgagtggggcagaagtgggtatcttgggtgggatgaagcatgcttcttactccccactcccagcagggtccagcttcactggggctggcaagagagagcctccccagcttggtgcaggagtggcccgccatgccatttttctaggtcccattagctcacacgaccctggggaggagacggtggagggtgccggaggaaagtaagggcttatgggaactgagatgcatttgtctcccccactaccccccacaaattgatgagctctaggcaagctgtgtttaaaatgccattcaggctgggtgtggtggctcatgtctgtaatcccagcactttgggaggctgaggcgggcagatcacctgaggtcaggggtttgagaccagcctgaccaatatggtgaaatcccatctctactaaaaatacaaaattagctgggcatggtgatgtatgcctgtaatcccaactacttcggaggctgagacaggagaatcacctgaacccgggaggcagaggttgcagtgagccgagatggcaccattgcactccagcctgggtgacaagtgtgaaactccgtctcaaaaatgaataaataaataaataataaataaataaaatgcaatgcgaattatgcctgctcatttgacttggggaatacataaataaataaataataaataaatactggccattttctttgcagcttctgctgtgccaggccctgagttaagcaccttttgtgcgtcatctctttcaactgtaacagggcctgacaggcagatgcctgtgtttccttcagagatgggaacgctgaggctgccagagggaaggatctgctcaaaggcccagaactaggaagcaggagagctgggaccccagcccagggctgactcctaagtccaagcttgggcgggaggtgttggaggtgaccacgggaagcttactgttctccgacatctccagaatgtagcggatcagggggctgttgccatcaaagggcttggtccacgtcaggttgatggctcgcctttccacggtgctgagagtggccactgggtgctcgggcgcgtggggcagttgcctggaaaagagacacgtggtcaggcatccctatgtggtctgcaggcaggtgacgggggcgctgtggacacaggttgtgtaggccttgaccttccatgataccgcatgcttagacgtaaaatgtggccttcgggccatctacctggagatttttctctctggaaccagagccctcctgctaaagccatcctcacacccccctgctcttgacggagggcctaactgagctgagagaaaggcctggaaggatgctgggggtatgtcctgagcaaagctgaacagttcaggtcacacgtggcctggggatctgaaaaaagggactcggctggctctgagcatgccagttgctattgcctggaccgcctctgccggggtctgggagggctgcccttacctgactcgcaggtgggcactgcgagagtcgttgcctcctgctgagatcacccggcaggtgtacgtgccgatgtctcccgaccacgtctgtgagatgtgcagggagccgtttctgtccaggcggatacgaggatggctctccgtgcccagggtggccccgtccttctcccagatgtacctaaaagtaagaagaacccgtaagtacagagggagaggaaggtaccttgggagtgggcctagcctgaagcttgtcccgagaaaatagctccaaagctgggcagaggacaactgcaggcaacagccaggcaggacactgggatcggggagcgggacactgttgaaggccaaacagtctggaagcccatcgttcctgcggggagggtgcaggagagtgggagagcgaacgcattcagtcattattggtcgttacaccttcagttcaggttgggtcaaagcgttgttgcttctggccagaagcgcttgcaaaacagccagtgaaaggtattcttctgaagaggctgaaagattacagctgaaaaaaggaatgcaagtttcctcatagtcacatttctgaattagttttatgaggggaatcattatatcaatgcatcagtgtgacaaattgactatagtgtccaaaaaaatccctttagcttcggtcagtcaatacaaatggggcttgagaaattacacacgcatcagtgcttgacaataaaaaatatcttctctgaatttgttcttgaggaaatagaaccattatcattgtcatcaacatacagggagtgccagccctggggggcaggatgccacacaatgaacccaggcgaggttggccttggttctcagtacaagtgtgaggaacccggtggtggctgagatgctttgcaaatagccccgttcagctggggtacagggtgggggcctgagctgctggctcccaggactatctgggtttacataatgtcagataactagggagagtgaatctgtaatatttttaacctaagtttcaaaagcagaaccaggctgggtgcatggctcacaccggtaatcccagcactttgggaggccgaggtgggtgtatcacctgaggtcaggagtttgagaccagtctggccaacatggcaaaaccctgtctctactaaaaatacagaaatttgccgggcgtggtggccagtgcctgtaatcccagctactcttgaggctgaggcaggagaatcacttgaacccgggaagtggaggttgcggggagccgagatggtgccactgcactccagcctgggcgacacagcaaaactccatctcaaaaacacacaaaaagcccccccaaaaaacagaagcagaaccaacagaaaagtaaaaagtacgggtaagaaaaataaaaaaagaaaggaaaagaaaaagaaaactcaaaagttttctgatactagggaaccacgattaacatttgaatgtgtgcatatcttccagacccttcttccccgcccggataggcagtgcactgcagcactgctgcattcaggagtcagactctcaggccaaatgctggctttgctactttccagctttgtgatcttgggtgagctaatttattaatgaatttatttattttagacagagtctggctctgtcgcccaggctggagtgccgtggtgcggtcttgactcactgcaacctccacctcccaggttcaagtgattttcgtggctcagcctcccgagttgctaggactataggcgagcaccaccacgcccgactaattttgtatttttagtagagatggggtttcaccatgttggtcaggctggtctctaactcctgacctcaagtgatccacctgcctcagcctcccaaagtgctgggattacaggtgtgagccaccacgcctggccttgggtgagtttatttaaccttgctaggcctcagttgcctcacctgtaatatgaggaaactaacaccacccacctcatagcactgctgtgaggattgtgcaagctaatataaaatagagaagtgcctgaaccacggcaagcggtcagtaacagttagcctttgttacatattttaaatgatacagtatatttacatgaatggtatacagcaatctattcagccatcctatttttatattttattttattttattttgagacagaatctcactctgttgcccaggctggagtgcagtggtgcgatcttggctcactgcaacctccgcctcccgggttcaagcaattctcctgcctcagcctccctggtagctgggattacaggcctgcaccaccatgctgggcttttttttttttttttttttttttttttctgtatttttagtagagacggggctttgccatgttggccaagctggtcttgaactcctgacctcaggtgatccgcctgcctctgccgcccaaagtgctgggattacaggcttgagccaccacgcctgaccagtcatcctgtttttaaagctgctttttgactcaataaaaatatcataaactctttttgatgtgatatttccacaccatgattttttattggatgcacatgtgtcagtacagctgttttgtaatttaaccgatcccataatgttggacatccagtttagctccttggtttctaatattatagttaaagctgtggtccttatggcaaaatgtttacaaccattccaaatcatttcctcaaggacaaattctcagcagtgaaatcgttgagttaatttttaagtcttttaatacctatttacaaatcaacaacagtaatcaccttcaattcatccctttatttagaaaggacttgccagcactcacaggatgggcagaattttacttaaaagcaaatttagttgcagagagtaattcccatgtaagaaatagcctatgggggccgggcgcggtggctcatgcctgtaatcctagcactttgggaggccgaggctggcggatcatgaggtcaggagattgagaccatcctgctaacacggtgaaaccctgtccctactaaaaatacaaaaaattagccaggcgtggtggcgggagcctgtagtcccagctactcgggaggctgaggcaggagaatggcgtgaacccgggaggcagagcttgcagtgtgccgagatggtgccactgcactccagcctgggtgacagagcgagactccatctcataaaaaaaaagaaaaaaaagaaatagcctatggcaagcagacattctttgcttcagaatgtggtgctttaggaagcagagatcactgcctgtgaagtatttgtgccaaaacaattgaacatgaatctaattagcagttactgaaattgaattataaatacagaggatagaagaacaggttaacaacactgtgagacagcagccaggccaatccagagtgttgaatattccatagcaggatcaacaaactatggcctgctgcctgtctgtgtaaataaagttttattagaacacagacatgcccatctgtttacttagtgcctgtttacatatggctgctttggcactataaacagagttgagtagtcatgacaagaccatatggctctcttaaagcctaaaatgtttactttttggtcctttacagcaaagattgctgacctctgtcttctagaacctggtttctccaacaaatcaattacaaaacaaaaacaaagataaaaataaaaaagaagtcttttcaacaaacagtgctggaaaaccttgacatccacatgcaaaaaaaaaaaaaaaaaaaatctagacacagatcttacacccttcacaaaaattaactcaaattggatcccagagctaaatgtaaaatgcaaagctataaaactcctagaagataatacaggagaacatctagatgaccttgggtttggcaatgactttttaaatacgacacccaaggcacaatccatgaaagaaagaacagataagctggatttcattaaatcaaacattgctgctctttgatagacactttcaagagaataaaaagagaagccacacactagaagaaaatatttgtaaacgatatctttgataaagcactgctatccaaaatctacaaagaactcttaaaactcagcaataagaaaacaatctgattaaaaaatagtcattgacagatgcctcaccaaagaaggtacacagaagaccaacaggcaaatgaaaagatgctgtacatcatatgtcattagggaaatgcaaattaaaacaacaacgagatatcacagcacagctattagaatggccaaaatccagctgggcacagtggctcacgcctgtaatcctagcactttgggaggctgagctaattttttttgtatttttagtagagacggggtttcaccatgttggacaggatggtctccatctcctgacttcatgatccacccgcctcggcctctcaaagtgctgggattatgggcgtgaggcacggcgcctggccagagtgtttttttctagaactattttggaggttttcatgctagaaacctgcacccgcccaggccctcacccctgcacctggctttgctctgaggacgtgtcactcaggattcagcggcaccactttagtctggtttggttgttgagatcctttctattaggttggtgcaaaagtaattgcagttttgaccattcctttcaaaggcaaaaaccgcagttacgtttgcacccacctaatagtctgcttagggaaccctgctgtgttttgcagatagaacagggttttcaatcctggtgacacattagaatcacctggggagcttcttaaaattgctgaggtctgggtctcaccccatccccaagatctacctcaagacggagggtagaagggatgtccccgtccccccagtccaaggaagacagactggggtgggagctgctggggtggccttgggcatagactttgccaattttgggggggataaagggatgattctgctccccagaatcatccctttgatgaaaagatggtcctagatggttaattccgtttaaggcgaggacctcccttcagtaacctggtacagggatttctgacctgcagttcactggaagggcctacagagtgggtctgcaggttactttgcaagagacccccgaatcccattatgcatcagtaactgtctagagaatgaatacaatgtatgtctttctcaaataagttgacactttttataagtaagtcatcttttttataaataaagtctgatttaaagtatactgaatttcagaatttccctattaatgaatgctaaaagtatagctactacacaatgaatgggcccgagatacacagcagtattctatgtgggttctctcccaggaccttttttacagttggtatgttaattttttaagaaaaatctattaaacccagaaataagcatattctggaatctcagtcaaaaatcttctaactattaatacatctatgtacatttttgcatttgtgctagcgtcatgtgatgactgccttaagtggtcaacacttcatgaggtgtttctcaaactggggccgctgatatgttctctgagaatcagtgttggccaaaagcctggagccccttgtaccaacctgggctccccggagtctcatttgggggtggctgtacagactgtcataggtccagtggccaccagatggcgccccaggacgcagctgccttcggcatgaggaggaggccatttctcccagtgcaggagcgccggccccttctagcctcggtgccagttgctttgacagtgatattgctcataaaatagagaagcaacacgcagggaatatttatttctaaggaagcagttgcatttccctcagcattctggagctcaaggaagagaaggcagggacaatctcctcctggttttagcttccaaagccttgggggtgggggtagggtttggttcaggtgcttgggaggggtcccggcttttatacctttcttggctgcttcctcccagcccttttagtggcttccacagaggcgggactgagttacctggaagccaagtcccttgccaaggtcccggcttggccatggaagatggtggggtgacctcggtttggaggctcagtttcccacatgtgcttctcttgcagggtccccccaggggtcatctcctgccccacccctatagctgatcccatatccgcctgcccagacccctctgctgcccattcagaggccagagggccaaagacttggggtgggctgggggacactagcagtggcgtccagggccagagacagcagctccttcccttccatgctcactaacccacaagcctcttcctttcccctccctcaccccctcctccattcctcttacttcatctttctgcaccccttcctcttttcctcccaccttggaaactggcttaactcaattcagggtagctcagttcccgggtgtttatttcataccccctacctctcagccctgcactcagctctggaaatgccactgcccaggagaaggcgtggctctgcagctgttacctccctaatgtggacactcgcccagctacaagctattgccagaggctccccctcccctcttgcctggagtcaacagcagagccagtacctgatggttactcgggggtcgtgggtcactccgcacaccatggaggcctgggtgcccttgatgacactctgatcctgggggggcttggtgatgcgggtccgagctgaaagatacagcggagacagcatggtgagaagaggtgtgggggctgtgtggctggactctgggtggataccatatgaaagcccccaaatggttaaaaagaacaatgagctccctggtactttaattcttggaagccacgtcatagttggggctcattaaattttgctctcacaaaccatgtatgggatggagagaccaaactctaaggacgatcaggaccatattttcagcatatcagtggtccagccagggtaaaaatagggctttctgatttccagtctagtgcttcatgcaccaggacccctgggctcagcccagacaagtggcccacaggtatgctgggtgtggatccaaagttggaagtggcttgagaagctctcttacagcaggggtcggctaactacaggctgggggccaaatccggcaggtggcctttttggctaaataaacccttactggaacatagccacgcccattggatgacataccgtctgtggctgctttctagataaaacggaagctagttgagtcgttgtgacagagaccgtctggcccacacagcttaaaatatttatgatctggccctttcttgaaaatatttgccgatttctgccctaaaatatatgaaggcagctctcctataacttcaatgttctctcaagtcggccaagcatagcatcaccggcagaatcttcctagtccctggcctctgaaccactttgtcactgtccctctgatgagaagggccctgactgggacagacactggggatggagacactggtggtatgagcctgtgccccgtagctgtcctgagtcctcagcacctacagggatgtacacacgcacacacaaatgtataaagccctgtggctctgcacactcaccccaaacgactaggtctgctgaggcctcatcgaccccccgagagttggtggccaggcaggtgtaggtccccgcatcggagatgtgtgtggggctgatgaggaggctgcccgactccaggggtgtgaagcgaggcagctgcacagagccactggccaagatgcgctcccctgagggcaaaacagggtgggggtcagcctgtagcccccaagggcacaccctgcccttccctggccgctccagggcagcatggtccccccacaggcccctggctctggaaatgctggaaggaatgaggacagatggcggtggggctggggtgggggctgagagacctggagagctttctggcttagggacggacacgagggcacagggtctcagagcgggcagcctagagcccaggtcccctgatgctcctgtgcccgccacaccacgtgcccttcaacagagaagggggcgcagtttcctgatgacggtgagcagtagcccggcacagccctcagaggcagctggcacccgggttgggggagctggcggggggacagctctgacaaggtgatgacgggcatcctgcggcaggatgcttctggggagagtcaccttcaagagagtgaagggaagtgacgggagctgcctggagtgggggtggggtagagagggacacgctgtcccccagcagcagccctggtcaggacagacctccttctgcagggggacccagggagcctggggcccagcctgggagggtcctggccagagaaagagggggagaaagagagagtgcaagtgcacctgcaggagtgagcctgggaatgcaggtctttgtgactatgtctattttaaagaaccccccacccccgtaaggaagggaatctccatgtgtccatctgggggtcgcatgtccgtttgtacatgcgtgcaggcacagtgaactgagtgtgctgggtggatgtgtttatttccatgtgtaagcacgtgcctaggtgtgcccctattatccccacaaatgtttattgagtgcctaccgtgtgccagactctgttctaggtcctgggagacggcagtggacaaaaccgacacccctgactttgtggggagacaggccatgagctaggtaaataagccgatgaccaaatgcatgagaaggtggggagtgaaggaggtagggctggaggggagggctgggggctggggcagggtgagtccttggaggaggcacctctgagctggggcttgccggtgtgaaggagcaactgtgtttgtacgtgtgtgtgcacatgtgtatgtacatgtgtgtgcatatgtgtgcacatgtgtatgtacgtgtgcatgtatgtgtgtgcatgtgtgtgcacatgcgtgtgtgtgcatatgtgtgtgtgtgcaggggagagttgtgaaggtgagtgtgcacacacagaggtgaagaggaagcacacagggcagatggccttagggaggtggcttgggctttgctggttccgccatctggagccctctgagctgcctggggtaggagactggcagcagccaccactagaataatattcatcatcaagcacctatcgtttcctgggctttcggactcccaggcataatgcaggaccctcacatgcacgctatagtctagtcttcacatcaccctggggtatatatattattgtcaccagtttacagatggggaacctgaggctcagagtgagttagtaactcaccagggtggcaggtcttggaagatgaagagctggaccttgagcctggcaaggctgggatgtgaaggatgctcttttttttttttgagacggagtctcgctctgtctcccaggctggagtgcagtggcacaatcttggctcactgcaagctccacctcccaggttcaagcgattctcctatctcagccccttccccaagtagctgggattacaggcaactgccaccatgcccggctaattttggtatttttagtagagaccgggtttcaccactttgggccaggctggtcttgaattcctgacctcagggtgatctgcccacctcaacctcccaagatgctgggattataggcatgagccaccgcgcccggccgagagatgctctcttgggttgtacagtgtatgaccttcacaagtgtacgtggggaacccaacctggctggctccagagcctagttctgaagactcttctaggctatcacccagccacactctctgaaggtgtgttccatctacctttctgccaagtgatagctggtcggggcgcccccgaggtctcacatgctagcaccactgacatgccatcgatcaccgtgctgtccagggggcctctggtgatgttaggggcgatgcctgcaaacagagaagtggggccttttagccacaccctgggagatgtcccccaagccagagggccaggggcctccaagcccaccgagggccaggccctcatcctccccctgccatggtgaggggccctccacgaggaaggatgtaggcatcttgatggagccccagtgtttggaagaagcccggaggggtcatgaggactcccctatgccacctgccctgtggaaggacccaggtgacaccagtccccacactgcttggattctcaggcctgcatttgggggaaactgaagaccccaggaggcagctcccatcctccctgacaaggttgttggggtttacaagccaaaagtgaaaggaaggctctggcttcttaaaagaaaaacagccacagccaagagggggacttctgccactttctaagtggccctgccccaggagctccattcggccatggccaccgtttagggttggggcagcctcctggctttgcactctccttgccccatcccagccctcaaggaaggagctcgccagatgggcgtgggaacagagctaagttcacctgcacttggaagccagaagcaagacggcagccccttggtagccacctttggggcacacctacaagctctctgccccacagctgccctgtccgcggcctctgtgggtctgggtgatgaacaccgtggagctcaaggagacccctgaacatccccattcttcctgaggagcccaccagtgctttgcatttacacagacctttgagcttatgggccactcacagtatcatcttttttcttttgtttttttgagacagggtctcactctgtcacccaggctggagtgcagtggcgccatcttggcctctgcctcctgggcctgagtggtcctctcacttcagcatccctagtacctgggagtacaggtgtgtgccaccctgcctggctaattttttgtatttttggtagacgaggtttcgccatgttgctcaggctggtctcaaactcctgggctcaagtgatccacccccctcgacctcccgaagtgctgggattacaggtgtgagccactgtgcccggcccacagttatcacctttgattgctaaaaacagctctgggaagcggccagggcaactatggcaacccctgacagagactccaagggcagaaagggatttgcgagcaggagaactaagagaaaaacaccagttttcttctttggaaacatgagcaggtcttctggaatggggttactccagccctgcctgggaacccagggatagtcgcagtgccagagctggtacccgtggttggtttcatagctccttttctcaaaaagccgtgaacgcaacctgggccccaggacattggagagaacttctagggaccagagatttcctccagggctctggactcagggctgcagaggcagcagcggtaactggctgtgcccccaggctgctgggcagcaggcggcctttggggatcctatctgcttaatggaacgtgctatgcacaagaggcccctcggaagaccttggaagaaagctgcgtcctgggaagaggggctcacgggcagcacaagggaaggcccaacttactggtgacagccaggtaggtggaagtttgcacctcgccggctgcattgcgggcgaagcactggaacatgccggtatcatcgggcaccaggccgctgatctgcaggcccccgtcgttgcgctgccggaagcgggtcaacttctccacctccaccacggctgcgtccttgtaccaggtgatggagggcggcggcacacctgtgggcaagacgtgggcccaccgtcaacctgcctcctgcctcctctccgcctaggaggggtgcttgggaggaggccgggcccggaaatctgcgagggggtccctggtgaatcttggtgtctagaaccttctcagaggtgccactttgggtctagggagaggaggaagatgctctttgagtggtaattctcaaagtctttgggacagagtaaagatccgggaatcagtttagcatggaaactggattggacaaactaatttatttattctattttttatttctatttgtgtagagatggagtcttgctaggttgcccagggtggtctagaactcttggtttcaagcgttcctcccacctcagcctcccaaagtgctaggatgacaggtgtgagccactgcacctggcctaatttcttattttttattgcagtacttagcagacatgtatgtgtgctctgggaacctccaagtgggggatgctttcccaaacgaatggcgccctgtgtcgaagagcacgtagagggtccagtgttccctggggggcacttggaagccccccataccggctttgcacatggaggtgaaaggaggaggctcctctcctcgctctcagcctggcacattgttttcataagttcccccagctgggctgggccgtggtggctcatgcctgtaatcccagcactttgggaggctgaggcgggtggatcacctgagctcaggagtttgagatcaacctgaccaacatggtgaaaccctgtctctactaaaaatacaaaaattatcctggtgtgctgatgcatgcctgtaatcccagctacttgggaggctgaggcaggagaatcacttgtacccgggaggcagaggttgcagtgagccaagatcgtgccactgcactccagcctgggcaacagagtgagactcagtctcaaaaaaaaaaaaaaaaaaaaaaaaaagacttccccagaagagttggccacaccctattccaaggagcaccccacggccctgtccccactaagcctgcttgccttcccttcccggcaccctttgatcctgacagcctgtgatgccacatttcatccaatccaccatgcgctctctttcccatggtcacgtctccgagatcaggatgtgtcttataatcaacagcatgtcataatttaattggctgccttttttctttcttagtggtccataaaataatggggcatcttacaacccatggcattttagatgagatgaaataagttctctttatttgtttatcagcttgcccatctccctcccgagaatgttacattctacgcgagcagggatctggctgtttggtttattatgtatctccccactcctgaggacactatcggcacatggtaagccctcaaaaaatatttgctgcctgaatggatggatctttgccttccccttgtggagtctcagaagggaagtcattactcatcccctccagcacagtcctcattcctgcagagacacattttgcccctttgctcagcgtgtcccactgtgcacgctcttctctctttatcatcccggatttcaccctggctgcgggctgtcttttggcggaaatgaatcagaaggaaggacggtggggaaggggaaagtagaaattctccaggaactctttcaaggggggttaagtaggaatagcggagggagctggcagaggagatggagcaaaatggcccaggaaacaggctgagcttataagacacatctcaggtgagatgcacccgggggctgctggttctggcattacggtaatttgtcattgtctacagctctcaaattttgggaaatttgggtctgtcacctgtcctgaaattactgtaagttgggttcatttgtaaccctcaagttttggtaccgtaaaggttgatttccagcctgagattatggtaatttggcctgtttgtttcctggggtgcctgctcagacagccagacagactctctgcctagtgacatggtctcgagaagaagctggaatttagaaatgtccacaatgaggatgggagaggctgaagatctggggtctttgtccccctccagcggtgccacctcattacctttggcctgacaggggatgtccaccaccttctccatctccgcagtgatgtgtctttctggctccttgacaaactgaggcggttctgcaggaggaaggaccaggggagggggtcagagccatgctcgctttgatccagccactgtagggggtcacccttaaggaggaccctcgccgtgctgcccctacccctcaggggagccctagcagccccaccctctctcacccagcactgagaggtaggcgccccggacaacagaggggacgctgctgctgcgcaggacagcctcacactcgtagtagccggcgtcactgccggtggggttggggatggtgagccggcggttgtggtcactgatgccgcccgacagcaataccccgtccttcttccaaatgatatgtagcttgatcaggggcctgcagagggcaagggaaggccagtgttcagccatgaggactcccagaggcctgagaggcagggcagggggtggtaaggagtgtgggcttgggagccgggctgcctgggtttgccaccttcctgccactttgtagatgcaagatcttgggcaagttcccacagggctctgggtctcactttcctcttctataaagtgggcgcatctgtgcccgcccagggggttgtagccaagatgaatgcattagtgccagtgaagtgcttggaacagggcctgctgatggacttggaactcagggcttggcagctcaggcaaagcaggaaagcagcctggcttgcagctcttttttctggtcttccctgtgtgctgtgccccatctgaccacagatcagtgacacggaggagatgaaggtgagggcaagtgacagacagaaacatgaaacacccagagtttgaaaaggggaaataagggcagacaagacagacagacagacagacagacagaaaaacccattccccaactgcaagagaagagcaagggtgtgagtctggcctggctttccaccatcaccaacccctgcacccccaagcccccgagacttgggtctgtccagacactcctgtttagcacctggtgggtccctgaggacggatcttccaaagtgggcccctgctagtgccatgggggtattcagaagggccccatggaaaaggagttctgtggccgcatacgtctgggaaacagcggcttgagtgacagtagcttgaggtgacgctgggcagtttcttcatcgaggggcttctcagggctttcactgcacagttgcaccctggtggccttgcccaagtcctggggtttggatgtgtgtcctctccaagtctcatgtggaattgtgatccacaatgcttggtgttacccacttggtgatggagtgagctcttactctgttagttcatgtgagggctggttgtttaaaggagcctagctcctcctcccctctctcttgttccctctcttgccataagacacgctggctcccctttctccttctgccatgattggaagcttcctgaggcctccccagaagcagatgctggtgccatgtttcttgtacagccagcagagccgtgagccaaataaacctcttttctttgtaaattaccatgtctcaggtattcctttatagcaatgcaaatgggctaatacgccatgcctgtgagaaacttgggatgggaggagcatacttttagaaatgctgccaaaaataacaacaacaacaaaaaaggctggacacggtggctcacatctgtaaccccagcactttgggaggctgaggcaggaggatcacttgagcccaggagtttgataccggcctgggcaacatagtgagaccctgtcttaaaaaaaaaatgctgctacaggacatgctctccctctccaggaagtttcaggtcaaggggacctcagggggatcatcagtctaaccccctgcccatcccattggtttaactttatagtgcacttaggaagggtcaggtcaggctgggtcagcgcgctgcctatgcgccttccgctggggttggtgctcagatcattcccattttacagatgtggagactgaggcccagagggcggcagtgagtacaggcctgggggagagggggcagtgcatttcaactcagctatcatccagctgggtgacgttgggcaggccacttgccctctctgggttctgaagtggtgacacctatgccatacattgttttgggaggaaagaggtcttgtgggaaggtgcttagcaggatgcagggcacggaaggcacttagccacacataatgaggctcaggggtttcataattgtttcctgtgtgggagaggtgagggccgcacatggctgggaagggctcgggtggctcctgacccctgatctgccctactccaaagcccatactcttttttttttttttttgagatggagtttcactcttgttgaccaggctggagtgcaatggtgcaatctcagctcactgtaacctccgcctcctgggttcaaacgattctcctgtcagcctccagagtaggtgggatgacaggcatgtgacaccacacctggctaatttttgtattttcagtagagatggagtttctccatgttggtcaggctggtcttgaactcccgacctcaggtgatccgcccgcctcagcctcccaaagtgctgggattacaggtatgagccatcgcgcccaaagccgtactcttaaccaccatgtgaatcgtttcccatgcacacttccctcctgcacaaccctgcatgcaagagggctcgctttgagaggccacccactccctctgggctcctccaagggttagaagtgagtccaccctccctccagtcctgtacgtcccaggctgacgtccccttccctgtaagttccatccagggcctggttttctcttcttgggctacagagaacaagccagccctggttgtacacagcaaccctctgacaacagccagcaggtctccttgcatccctcctcccctgtcctggatcctcaggtgatgtggcttctggctgctctccctggagcccgcagtttgggagcagcagctggagttacgggtgcgggagcgagggaagatgcactacctacctggcattggccacacactccaaggtaacctctgaggtgccggccaccacgctggtgtttttaggtgggatgatgatggtgggtgcgatggggtctgcaggcccccctacatctggagagagatcagatgttagctgggggcgaggctggaaatcctatccctgcccagcctcattagaggctgatgccctgggaggtctttgtccttaccgagtggagcaggtggccatgggggcagccccagagcagacctccagacactgaccccagggactacctgatccctctacttcctctgttgatgagtcaccacaccagggtccaaggagagacatcgctgaccttgacggccttccccacccctcctgtaaagcagccacacccccctctccccaccaccaccctgtcctgttccattcccttcaaatccttccctctgcccgggttgaccttgttggtttagttctgcattgtccacgtcctccaccagaatgcaaactctctgtacgaggtcaaacagagtcaccggccccctcccccaacacacctcccgccaattcatgcccatctggcacctgtaaatgtgaccttatttgcatataggatcattacaggtttgtaattagttaaggtgaggtcatattggatcagggtgggctcaagatccaatacgactggtgtccttgtaagaagagggaaattgagacacagatgcacagcctggaagactctgtgaagacagaggcagagtgaagagatgtggccacaagccaaggaatgccaagcattgctggccaccaccggaagccaggaaggggcaagaaatgagactcctctagaatcttcagagaagtatagccctgctgacaccttgattttcagacttctggcctccagaactgtgaaaggctcaatttctgttgtgagccactcagctggtagtactttgttgtgcaggccataagagactaaaattctccctgaccaggaacctcatgggtctttgctgtggactgagctgtgtcccccacccattcatatgttgagccttaacctccaaagtgatggcatttggaggagtcccttgggaggtgattaggattagatgaggccacgagggccgggcctcatgagggccaatgagggtcccaaggaaaaagaaaaatgttctcttaacatattgtcaacttttgcttagaaaagcatgtaatactttaattctctcattgaatgaaatgaaagagttaaggatgaaactctcagaaagcaggtttccaggtacttgttaggtgtgtatatttccatatttcagattcatgtccttataaaaagaggaagaggccagagctggctctctctccgccatgtgaggacacggctggaaggcagacatctgcaagctgagaagagaagctgaccatactggcttcccaatctgggacttccagcctccaggatggtgggagccagaacatttgctttgtaagcccccagctgtggtgctttgttatggcaccaagagctgactcatgcagtcttttttttttttggacggagtctggctctgttgcccaggctggagtgcagtggcacgatctcggctcaccacaacctctgcctcccaggttcaagtgattctcctgcctcagcctcccaagtagctgggatgacaggtgccaccaccacgtccggctaatttttgtatttttagtagagacggggtttcactatgttggccaggctggtcttgaacttctgacctcagatgatccacccgcctcggcctcccaaagtgctgggattatgggtgtgagccaccacgcctggccaactcctgcggtcttgacgaccacctctcctccagcacgaagaaggatgcctggcacacagtaagtgctcaaatacgtgtgttaagtgaacaaatgaatggatctagagttaccatcatccaactcccagggtcgatgattgaaatgaacaagaacttcctgtaagtgggttttattggaaaaaaaaaaagagagagaaacactccaaactcctcttctaatagaggtggtagcaattccttttttttatattttgagtttttttttttaaagtagaggccagattttcatcttgatgggtcagtgtaggcccgatattggcataaactccaatattctgtgtatgcctgatccatggctcctgaaaatacaacctctgaggactttttctccacaacaaatctatccagttggcccctttccagaaggttctggaggtagtaggccatgatgacatgctgggccctgcggtgacagtgacaggctgttctttatggggttaggggcagggtgcacagtggccccactgcccctctgggccaccttgtcagccctgggcaggttttccttccttgactccaggccttgctagaaaaggcccaggaagaatgcgcataaaatgtaaaaaataaagtaaaatgaagggggaaagaaaggaagcatataaagcaaaataattgcaacaatataaaagcctcatgtaggtgccataacgagcgatcggattgaaagctgctgatatagctgaatccataaaagtgtgctctaagttgtttattacatgcgggggcgcgcaggtaccacggctcagattaatggggcacaagtaagagacagacagttagagcccaagccagagcgccgcatggcacagccaggtaaacagggagacctcaaggaaggcgagttctgagtttaaaaatacgagggctgccccagggctcagggctggctcgttggctctggaaggaatggaggagagatggccatgtgctcaggcccaggtggcagcctgcagggctcgatgggggctgaggtggccagggatgctggcacagtgagaaagggtcccaggggtgaggaagacctgggctcaaagcctagctctgcccccaggtatcctggtgacttcatcctactgagtttcagtcttctcaggggggaaatggggatgaaagtcactacctctcagggttgtatgaattcaggccccagctcaacaaatctttcctaggtgaatgcttgacacgtgccaggctgtgttccaggcaccagagattctccaccaagcgagatggccagggtctgtcctcatggagggtgatgtcccagaggaagtcgaaccaatgctcgtggggttaatgaatgaaagagcgtgtgatggttgccgggaagggggcagctaagctggtctggggtgactgcagagtgcctggtacacagtaggtgctcaataaatgacagcctcccctcctggagatttgcctgcctgtgcagggaagagctctccctgctagccctagtccaagtgacagactcagaggctatggagaggtgggagtcgcaggctcggggacgcacattaagccctgcagggtaccgggcaaggcctcaggcatttcatggcgtggctccctgggagacagcgggagttgagtgggtctcagagaagtgagtcctggagcagatttactgttaatgaaggtcaccccagcacaagtgggttattggggtaaatggggctccaaaggccagaccatgaaaatcacaggtgagcccgagcaaagaggaggggtgtcttcccggtgagctcctggcatagggtgggccctggggtgggaggaagtgtacggggctccccacacggggggcctcactggatctcactgccccagacgctttgcgtaacagccaggacaagggacatctaacgtgatccatcctccctgaatcacctcattgaatcctcccatttttgccataggcaccaatttacagatggggaaactgaggctcagagaccatgtgacccacctgtgccacctcatttagtcctcccaactttgccataggcaccagtttacagatggggaaactgaggctcagggaccatgggactcgcctgggccacaggtcggtgagcggtggggcaggggtgtgagctgctcccctctcttgggcaggcttctgggatgcctgttctccagctgcccaggagccagggtatccaggccctgtgacctgaaccacccaatgcaggggccatgagccacacgtgcctatgagctcctgcaatgtggctggtgtccctttgatttaatgtgatttaattttaactaatttacatttaattaagaatggatccccaattcagttattagaacacttttaagcatgtacggaacaacttatgcatacgactctacttttcagctataaattttgtgaaatctaaatacagatcacgtatttcgggtgaaaatttcacatccagattgagatgtgatataagcgtaaaatacacaaggatttcaaagacttagtatgcaaaaaaccaatggaagatatcccattaatattctttacattgattgtatgttaaaaagataacttcttgttatgttgggttaaataaaatagagtaataaaatgaatgtcaacgatttctttttacttggtaaaaaaatggggctactggaaaatttaaaatttcgcatgtggttcacattctatttcctttcgacagtgtagccctgatccccggtatccacccaagcatggggttttcaggagctgtgacagtccgaatgaggtcaccagggttatcctgagcagggggcaacttctggggtcaccagacttgctctttccttctctggttctgaagagcatagggtccctataaagaggtgcagaaagctggacttcctggagtccaggagggatggaggaagcggtgcggaggggagagcagacggaggggtgaggcccaggagaggaatgaggggagctggtgctggtggtgggcgaagcgtcaattgctcctcacaaattggttggcaggcaggcaggcaggcaggcaggcaggctggggatttgtgtcacagagaggaagagggttttcaagtgcagtcacttgtggaaagagaaattagctaaaaatcagcggattctgctctgaattcaggataaatcagcgtgtgatggcaggaggccaagaggcagtggggtgggagaagcaggtgactaggcagggcttgggtgggtacagggggtcagaggtgacctgcccacctccctggggccagctggagggttgggtggtttgggatggagcagagagcgaatgactcccaaagtcagacaagaagagtagcctagtttaacgcctatgaggaggagctggatgccggagaaggggaacagacaggaaggccccgactctgtctcagggtaaactgagtcacctaggaggatgcctggctttgacttggaccatgaaccactcctgtgtctttgacattgtctcttaccaaatgacgggattccatgagactccagggaatctgatcactagaaaatatatggggagaagcatctctctttgatgactaaattcccttctcctatagaaacagcagccccagggtatgggctggggcccaggctgctgagacttgactgagaccctgactcgatgtcagaggttacaccctcaaccctgacggtcagtctccagatatacttgtgacgccgatgggtcagtctccagaatgaaactctcctccccgcattcagatttccttctaggcagactggatgctgagtaggggaaggagatccctgggataatgggaagcggttcctgctgaagtgtgaaaggccctggaatggggatggcaaggcctgggaatgtcctgggccctctggacatggacagcagaggctaggatcagaataagagcacagaaaggccccaggctggtccacaccctcatcttgccgctggtgggcaagtaccatcgtgaccaaggatgataaatgaggcttactttgggagcaggagttgtacagatgtggagggaggtgaacatctgcctcccccagcttgtgtgatggctcagctgctgctgaggaggaagctctggcctcgccccacatactctgggatttgggcctacgctgctcctgggctgtccacccctccctccttctctgtcttgggaatggagtatggagggaggggctcgtccagtagggagaaccaggccagaaagaacatcccagcatctcgtccctccaaagaaaactggcttcagtctcggctggacaagcgtctctttgccaaagcacaccaagggaatcacgcttttgtgtgtgtctcactgtgtggtgagttctagggagggctttgcccttttcgcccagggagctggaggtgtctgaggatggaggtgttttaggtgggtgcctgggcagagggcctgtcttcccatcagcagggaccacctggctcccaatatagacagcacttcttatgtgacagccaagtagagacagttagtatatttctgtaaaaacaagcttcagccctgcaatcacccacatgccctcctggtcagcatctgagccccgatagtggctgcaactcacacatgcacacgctcttcctctgccccacccctccctgggtccctggtagccctgctaacagttgtgctaagcatcctctctaccgatgcaggatctcaggcgtgtcatgggaacgggctccagcgttcagctgctcctttcctgcccaggcacccctggctctgctgtgtctcgtcctccttgggaaggctccccccggccgtcccctagcttccctgtccccctcctctgccactccatcttcccaatgatcccctggagcaccattgctaagatttaatggcccgctccaagatcggtcccggccctgtgcgtacttactctccacggtgagcgtgatgggctggctggtcttgttatccccgtttttgtcgttaacagcctgcacatagtagcgacctgcgtcaggggccaccgttgacaggatgacaagggtgttctccagcgtgatggctctgggaagaggaaaaggattcctctgacaggggcctaaggggctctgaacctccagggagtgggagtggaaaccctaagggggaagcccgaccatatctcccagtccccagcctcccagggcccctcctgccaccccctccccaacctcttactgcctacatcccgccacgtttagtttgcagagaatgctaaacacggtgctgatgctgtcaaccagacccagagacagcacgttcatgcccagacgccgaggccacccaaaggaagcttccctggcccctaccccaagactgggcaaggggcttccaggtatccccttggaattctgccctttcccaggtcacagcctccatggctgtgtgtggttatttctgcatgatgtacatccagacactgaagaaatgttctcagcatggattagtgaatgtcggtgaatgaataagtaaatgacaaatgaatgctaatgaatttagaaatgcagggccattccagagtccatgccttaaccctaatcctaaatctgttcaggattgatggactcaaaggccacaggtcacctggtgacatcaacttctggaagtcctgtctcccttcagtcccctttctgggtatcagtttctacctcttttttttttgagacagtctcgatctgttgcccaggctggagtacagtggcatgatcttggctcactgcagcctctgcctcccgggttcaagcgattctcctgcctcagcctcccgagtagctaggactacaggtgcgcgccactacccctggctaattttttgtatttttagtagggacagggtttcactttgttagccaggatggtctcgatctcctgaccttgtgatctgcccgccttggcctccgaaagtgttgggattacaggcgtgagccactgtgcccagtcttttttttttttttgagacagagttttgctcttgttacccaggctgaagtgcaatggtacgatcttggcttactgcaacctccgccttcccggttcaagtgattttcctgcctcagcctcctgagtagctgggattacaggtgcatgccaccacacccggctaattcttatatttttagtaaagacagggttttgctatgttggccaggctggtctcaaactcctgacctcaagtgatctgcctgccttggcctctcaaagtactgggattacaggtgtgagccactgtacccagctggagtttctacctctttgaagctcataaccaagagtgggactaggtgggctggttaggagggaaaaagaggctggtgtgttttggggtgtggtgatgggctgtttacctcagctggtttcctttgctgggatcccatcatgcagccccttctcaggccaggtcttctggcagggaaaaggggcttgtccaagcaggaagctggaggctccatggaatgtgggtgcaatggagccagaagcgccacccacaccggctcttcctccctccacccattctcccaatgacaaacaaagccattagtttgtcaagtatatctctggattttaatgcgatgggcctgagacagctgttaaacatccttaatgttagtttaacaaggacaaatccagttgaattcttttcaaattttcccattaggtgaatgttacagagttttaaacaggctctcaaataaacatccccactaatgcttctccagcccagcactctcccagcccggctgtgctggttttcgccccactctctcctggttttggtgcttcacatgctgagaatcacactcttggcacagctctgggaagcaggaagccaagccctcctgcccccaattcctgggtaccctaatgatgcccccccacctctttttttttttttttttttttttctggagagctcttggctgggcacagtggctcacgcctgtaatcccagcattttgggaggctgaagtaggtggatcacctgaggtcgggggttcgagaccatactgaccaatatggagaaaccctgtctctactaaaaatacaaaattagccgggtgtggtggtggtgcatgcctgtaatcccagctactcgggaggctgaggcaggaaaatcgcttgaacctgggaggcagaggttgcggccagccgaggtcgcaccgttgcactccagcctgagcaacagagcgaaactccatctcaaaaaaacaaaacaaacaaacaaacaaaaaaacaagaaacaaaaaacaggagagtccttttaacctccagctaatgaggcaataggaggtggggccagagccaggcgaaaatatttcaaaagcttaaaataagacagggatagtggtcattttcccacctgagagtttcctgcagggacttgtccttaggtatagcatgtgagggtggctgagagttggaggaggggtcctccccgtgcagggctctggctggggcacggggtgagctctggaatggagctctggccctagcctctaaagggcatgcagcttcctccttgctgggcctcagtttcctcctctgtgcaggggtggaagcaggtattctgtgagatttcttccagcccagaggttgaaggattctgattcctgttgctgcttctgttgtttcctcattaggcccaagatagccctgcagcccgccacctgtctcttcccaccccgcagaccgggacatggccagcttcagggctgacaggattttcatgagcactatgtgccgggaccatgccggcccagctcccccagccacgccacatccatgactatcatagaagcagcttcaagcctccagtgggcacactgggcacagcttggcccacgttccagttcacccacctgtcttaggacccttttggtctccaagaaggctcccacctccaatttcatctctttcttgatcaggaaggctcctttcactgtattttgtctatatcatgatcaagctttctgggtcagtggttctcaaccagggttgactttgccctccagggatgacaatgtctggacaacttttggttgccagctcggggagcgccactaacaataggggtcaaggccgggggtgttgttaagcacgcatcccgtggtgcacaggaaggccctcacagggaagagtgatcaggccccagatgtcaagagcgccatgcctgacatggtctgtcctaggtagagtgtatattaagatggcagagatggccgctgcccacctcagtctcaggcttcccttgtgtcatggactgcagtggctgggaagccagagacagactttgcatctctgcttgcatccaggtggggcagtgaggctgaactagtgggatatggaggaagggatgtgcaccgttgctaagcttggaccatgagcgcctcctgcgcgatcctcatgtctgccccctttctctctggcagagcaggacaacttggaaggttgtgtgctgatgatggcaaaactcctgcctctcatcatggtaggactttaaatggggctgggcacggtggctcatgcctgtcatcccagcagtttgggaggctgaggcaggtggaacgcctgaggtcaagagttcaagaccagcctgatcaacatggtaaaaccctgtatctactaaaaatacaaaattagccagatgtggtggtgcatgcctgtaatcccagctactggaggctgaggcaggagaattgcttgaactcaggaggcagaggttgcagtgagctgagatcgtgccattgcactccagcctgagcatcaagagcgaaaatccatctcaaaacaaaaacataaacaaaaacaacaacaataaatgggcaagaactcaacttctatggtgtgaagtcactgagattttgggctctgctttaactagtgcctggagggaagcaccctggactgggacccccagggcctgagttcaagtcttaaacacagagtggaacaggaggcagagataccttttgacttgccctctctgcgacccccaaaggcagtgaaggaaggtccctgggcttgtggctctctccagaatgtccatctcgttgatagacattcctgggatgatgctgtactgtactgtactgggtgctcttcctggcactcaggagggcttccaacctgcagcactgcaccccagaggcaacccagatggaaagaagctggaggaagaattcttgggggacacagacagcagaattcaactcttgggcaggggctggattccatttttcagccacaccccctggtttcaatgtactaggcttttgctatggctctgattggcccagccctgccctcccttccccccactgctcctgttaatccaggccatttttctcagctccctgcagcccccattgataatttaattatgcatgaaataaattatcctagaatgtgtccaaagcccccagcatgcatctttatgaggaatcttgtctcctttgcaacaatgagcaccggggcatgcatgaggtggtgctaatctctgctcttgccccaccagtgagagcggctctctgtagatagcagcgccttctgtgccctgcacacccctctggcagatagcactcatcagatgtgtatctctgacacacagacaccagggaatttgctgccagggaccttttctgctcacttatgaatattaatttgctgtaattgccaggataaaacccccagagtgttctatcatgtaggtggtaggaatattgcggtggtgtgcaggggctgggggtgtgtgtgaccagggaggtatgcatgtgtgtgcaggccagggtgttctgtcctggtgccacagggttgtgggaattaaaagaggatgaggacagaggcttggaatgagaaaaggaggtgaagaggtgttaggaaagggatgatgggagtaggttgtagaaagggtttcacccaccacaacaaatgtagcaggaaagtgccagcacacccctcatgcagccatggcagacattgctaatcaatcatgatattcattctaatgagtctagatgggacatcagaatccttctcaacacagtgttccaggcagccactaccaattgattggcttgcaataggccatgggaaataacctcagaaagggagctgggatggggctgggactcgtctacttgtcccaaaacctgtgtggagagcattccccttccacagcaaaatctcaacatccacgctaagaaacatccatgctaagaaccattctctgctggttttattgagcattaagttaggcctaagagggcacactctgactcacacagcatgagtcccctgttaacctggggtgccactccaattcttcaccctgctctgtatccacactctttgtcccgtgactttgcaggtcctgctgctcaaggaacagagtctattttcctacatcttgattctgagttctgccatgttcttgctttggcacatgggatgttagcagaagctggaaaagtgtatgttcctgtgcagcacagccaagtcaccccagtcacccagacaagtcagccagtcccagacaagtgagagagcccagccaagaccagaagaaccacccagccaagcccagcctaaatcaccagcctgcagactcacaagaaaaagaaatgtgtattgctctaagccactgagctggggttttttttttttttctttttttttgagatggagtcttgctcttgtcacccaggctagagtgcagtggtgcaatcttggctcactgcagcctctgcctcccaggttcaagcgattctcctgtctcagcctcctgagcagctgggactataggcatgtgccaccatccctggctaattttgtatttttagtagagatgggattttgccaggttggccaggctggtcttgaactcctgacctcatgtgatctgcccagcttggcctctgaaagtgctgagattacaggcatgagccactgcacctggcccactgagctgttttgttacgcagcatatctgtggctgtgggtagctgatacatactagcatggtggttcttaaccctggcttcacattagaaccacctggggagcttttaaaatttctgatgctcaaattccatcccatttcaattaagtcagagagtcttaggatagagcccaaggatcagtacacagtcacgcactgcataatgtttcagtcaaaaacagaccacatatatgatgctggttctataagattataatgaaactaccttatacaggtgtgccattaaaaaaatcttttacaccatatttttgtggtacctttcctatatttagatatgtttatttatacaaatacttaccattgtgttacaattgcctacagtacagtaacatgctgtacaggtttatagcctaggagcaatggactacaccatacatcctgggtgtgtagtaggctgcaccatctaggtgtgtgttcacacaacaatgaaacagccaaatgacacatttctcagaatgtatctctgccattaagcaacacatgactgtatccccaaactcccaaatgatttcaacaggtagctacgttgagatactccacagggcttgttccccacaaacactatcttttcatcgagtctgtgaacctgttttcaggcacttttcacataatacaagaattaaagaacctgactccggagttggcagggctggatgcagctccagtgctgaccagctgtgtgagatttggcaaagtagttaaacttttgggaacttcacttgattgcctgtaaaacggggagaaacccagcacctcaccgggttgttgtgagggtcattcattcaacaacgcctcctttctgcaggtgctctgcggactggaaggagaacgagattgagagcatcttcttcctcacagagtgtggctgtccggaaagagaggggatgtgtgtggtgtgcttagctcagtcctcaggacatagcagccattcaataaacggcagctgctattatgatgatggtgatattatcattatttgagatggagtctggttttgtctggaggctggaggctggagtgcagtggcccgatctcggctcactgcaacctctgactcccaggttcaagcgattctcctgcctcagcctcctgagtagctgggattacaggcacctgccaccatgcccagctaatttttgtatttttagtagagacagggttttgccacgttgctcaggctggtctcaactcctgacctcaagtgatcagtccacctcagtctcccaaagtgctgggatcacaggtgtgagccgccgcgtccggcctgtgatagtgatattattattattgttattgttactatgcttccttcccccaactagacttaatgctccccaaaggcaggaaccatccatctacgcctccactctctacagagaccaggacaggctcagtcctgtgtacacgcagcctgggtagatcagaaggtggtcttctggaagcaggggagagctggagttggaaagaggagagccccagctgcctccagacccgggggtggctcaggagggcggggagacgggtgtatctcgggaggaactgctttgttgctcgccttctgcggaggtgtggggtgttggctccatcctcctgcccacaggctgggctgccccagccaatcccagggggcacacagagacggccttgtgaacactcagaggcctgtgtgtttctctgcccagggcttccctggccacacctccgccgcacagccaagacacacacagccctcacacaccagtaaacaccctgccaacggacgcgcccagggcctcccggctgcccaggagacgccagcctctccaaggtcccccagcgccactggcctgagtcctgggcctgtaaccacggtgacagcgccttcgtatatgcctgtttgggttttttaagtgctctgaaaagcagatttattctccagctgatggtggaggcaacgccctgggattccccaggaaggggaccgggcatgggtttcatggtcccaagtccttgcctgtgcatcctaagaaagcccctgggaggtcccctacctggctgtgtcccacaggagctgaaaggggcttctgcacaaaggccctcctccacactcaagggagactttatctggccccaaacctcctcccccagacacccctcccctccccgtcccctcagagcgatgcactcacatgcggctgctgggcgggatcttgcggccgtcccggaaccaggtcacctgtggctgggggaagctggcgatgcgcggggcacggatgacagctgcttctccgtgggagacgctctggtgcttctcaccttcctcaaagctccccatgtctgcagccgggacaacggcagtaggatcaggggcgggaggtcagcctcagggactgcccagctcccaggttgggagtggtggctatggacggaaaattcggggcagacaggatgaccacagggaaggaggacaccttgctcgggccaccccattctctgcctcaccactagcaccctgccctaagctactgtctccattcatatccctatatccttcaatcggccagttcgttcaaccaccctgagaggttggtcatcatttcacacattttacaatggaaaaaactgctcaaatgggctccgagaggttagttaacttgtctaaggtcacctaactaggaagagacagagtcagaatttgaactcggaccttaaaccctggagtcaggctatgtagctcctcctcccctgccctacagtgtgcccttcagcatggcgggggttcctgtgtgaggtgaagggcaggtttctgtgccctttcagggagagaagtgtgggcatgctgagagaatggggtcttagatgcttgcaaatgggtgcagacagcgtttctctcctgcgccttgggtgtgtagtgtgtagtgtgtgagtttgtgtgtatgtgtgaacataaataccatattgctcttttaaaacatgccactgccttggcagataaggaggggaacatttatcctggctctgcctgccaggaggtaagcacagagcagaggagacgcgggtaggaaactcttcagccagcctgccggcctgccggggcgggacaagggggtagggagactaattccaacacggaggcttggagatagggtttgggaaggggtatttgtgtctctaccacacccttgaaaattaatggacatccctgttactttgattgtggcccatgggcaggtgcctaggcaccacacctgggcacctgtcagaaatgcagagtctcaggccccccaagacctgctggatcagaagcagcattttagcaagacgcttggcaagtgtgtccatgttcaactgtgaggagcatattatttgtcccaaacttgactgtgtgtcggaaccacctgtagaattaaaaaatgctgatgggagcctcacccccaaagcttctgatttcactggcgtggagtgtggggatgggagacatctcacatcattccattttcttttctcttccttccttccttccttccttccttccttccttccttccttccttccttccttccttccttcccccctccctccctccccctccccccctcccctctcctcccctcccctctcctctcctctctttctttctttctttctttcatctcactctgtaacccaggcttcaatcagccaagtgcagtggtacaatcttggctcactgcaacctctgcctcccaggttcaagtgattctcctgcctcagcctcctgagtagctgggattacaggcacccgccagcacgcccagctaatttttgtatttttagtagagatggggtttcgccatgttggccaggccggtcttgaacttctgacctaaagtgatccgcccgcctcggcctcccaaagtgttgggattacaggtctgagccaccgtgcccagcctacatcaccccaagccatcactaggatgtgcctggacctgtgcacagaattcccacgtgcagaaagatttcacactgctgactttaggcctttgtttccccattgcctagcagatccctccctaaccaagggggccgcatcctaagctaccgggtcccctcctactgcattgggtgttatttctcaactcctctaagaccactgactcttcttcctctccttctaccaggaattctccaacctggctgcactttagcaaccttgaggaccctttaatattcccagaggtgagaatcttttggggtgtgtgggctgacctcagtatttgtttattattattattttagagacagggtctcgctctatcattcaggctggagcacagtggagtgatcatggctcactgcagcttcaacctcttgggctcaagcaatccttccgcctcagcctcctgagtagctgggactacaggtgtgtaccaccatgcctgcataattttatttttaatagaaacgaggtcttgttatgttgcctaggctggtctggagctcccaaagtgttgggattataggcgtgagccactgtgcccagaccagacctgagtatttctaaagatgttcaggtagttccaacgtgagctaaggctgagttgggtgggtctcagaatctcctgagacttggcaaactcacaaaggtgctcaccactctccttccctcccaggcatcccccagggcacagaaaggcccgtctggctctctgagtacctgattcactctcttggtttgcagattctgtcacacaatcgtttgagaatgcgggcctacaagttcattttccaaagccctagtcttgattctctttccagccatgctggccccttggcagcttcacttggcctaatggtttgaccacaatctccctgcaaatgacacttgtgccttctgctctggctctgccctgagctctgagatccaatttccaacagtctgttgggcatttctccaaggagggccctccgtcacctccttgccaagctctccttgcatcctaagttctgttaaaatctccccttggccgggtgcagtggctcacgcctgtaatcccagcactttgggaggctgaggcaggcggatcatgaggtcaggagttcgagacaaccctggccaacatggtgaaaccccgtctacactaataatacaaaaattagccgagcatggtggcacatgcctgtaatcccagctactcgggaggctgaggtaggagaatcgcttgaacctgggaggcggaggttgcggtgagccgagatggggtcgttgtactccagcctggggcaacaagagggaaactccatctcacagaaaacaaaaactaaaacaaacaaacagacaaaaaaactcccctcatgccctgcaaacccaatcacctaagctcaaacccctggagcctttggtggagcttcccttccctgcccccaccaagcctttcaacttctctgggacattactgtcatttaccaaggtccctctggttcctccagccttgccaatgggctggccttactccagctgcacagaccctgggatatgcctcccaactccagatccccttctgtccatcttacacactgttcttgattagtttttctgaccttggagcctttgggaactcctcactgccctgggaaagtctaaattccctggcctggactcaaggttcttccctaatctgaccctagacaacctttcttgccttaatgcccacaccacgtcctgccacctcccaccccacggcctgtattttggctgggccactgcctggaatgccaccagaggaagccaagagtcaccaaggcaccatggttctacagcatcctggaaggatgtagtcaattaagtgtttcaaaagatcaaatctgctgctggcatccttgttctatacttggtagacagtgtgtgtaatggtaatggctttggagttttttagacctgacttcaaatcctagttctgtcgttccattactcattagccatgatgctgggtagatttctttcttttttttttttgtagagacacagtctcgctatgttgcccaggctggtcatgaactccggccttaaagctctcacctcggtctcccaaagcattgggattacaggtgtaagccactgtgcccagctaggacaaaacttttgactttgtcaagccttaatttcctcttctataaaatggagttaagaagggctccttcctcacagattgtactgagtatttcatgagatgatatgtgtatgtcaggctgtgtctctccagggatggctgcatcaatattttgctactattcacatactctttttacagtatgatggacattcctctcactgacagatggggcacaggtcaattccccttgaatctagggaccttgtgactatttgaccagtagaatgtgcaggaagtgatgccatgtgacttttgagactaggtcatcgaaacgatacagctgccacctgactctcactctctatactcgcccttggaatccagtcaccatgttgtgaggaagctcaatctagccgaagcagatgtgggagcagcccacatggagaggaactgaggtcagatgacagccagcaccaacgctggacatgtgaacaaacacgtgcgccctgagaggacttcagccccagccttcagccccagactgagcctcaactgaggcctcagtcatcccaggatagagtcaagctgcccttgctattctctgtccagattctagagccacagaatctgtgaacatgataaatgattgcagtataccattatgttttggggtagtttgttacatagccatagaaactagaagagtatataaaagtgttaaaaaattgtatctaatatttgtagtgttaaaatattggaagcctacatatttttcacagcttagtttaaacatcacctcctcaatgaagtttacccaaaaccattcaaatagaattcaaaaacagagcagttgagcacttaccctgccaagaacttctttctaggtagatttcccatgatccttacaataacatgacaatctcaatttaaataaatatatgtttttagttgtttattaatttccattacttggctctgtctataaaaaattacatcaatgaatcacattgatttcagttcttaaaataattttatctacttaaaaaacttttcacagaactcagaagatatatttgaacaatttaaagcaattttatggtaatagtgtttctttctcctctctagttttattagctccattttgctggtgaggaaatgaaggctcatggagatcgagtggcttatgcagctgtgaacactgagggccaggttcagtccatgttcaccctggccctccccatgccatccctccctgcctccttcctgagtcgcatcctgcattgcaatcctgcatacacattctttatctctttctatagatgctaagccttgagaggcagtcacattcagaagcaaatcctgacaagacatctgggcctgtgccctgcacacagtactttctaagttcactcaatgccagcattcaccacttccctatggagcccctactgtgggccaggtaggctctggggtaggcactgaaggaagacctaatgcctgccctcttggagcttccagtctggtcagggagacaggaataagtaaatcaacccaaaagcaaacgtttggtgatgtctatgacaactgtcgaaaaggagggaatgaggttcttcaggagaggaatagcaggaggacctacttcagactgggatttaggtgaggcttttcttaagctgagtaggtattccctaggggtgtatatgggaatgggaggggaagtacgtgaaggctcagaggtaggagagaaggggttcacagaggaaataaaagaaggccagtggggcagtgccatggatttgttcagtggatggatggatgtttggatggatggggggatggaaggttgtatgggtgaataggtggatggaggaaagaatggaagaatagacagagggatgggtggatgaatggaggaagggcagaggaatggatggttgtatgtatgtacatttgtatagtggtatggctgttgtatgtatatatgcttacatgtatgtatgtttggatggtgggatggatggttgtgtttgcttgtatgcctgtacgtttatatggtgggatggatggttgtatgtagctatgtttgtatgcatgtacatgtctgtatggtggaatggatggttgtatgtatgtttacatgtatgcattattgggatggttacatatgcatgtatgcatgtgtcatgggataatggttgcatgtatgtatgcatgtatgtttgtatgatgtgatagatggttgcttatgtgcatatttacatgcacgtgtgcatgtatggtgggatggatggttgtttatgcacgtttgcatgcatgcatgtttggtgggatgtatagttgtatgtatgtttacatatatgtgtacatgtatagtgggatggttgtatgtatgtacaagtgtctatggtgggatagatggttgtatgtatgtacatttacctgtatgtatgtatggtgggatgcatggttgtatgtttatgtgcatgtgtgcatatgtggtggaatggatggttgtatgtatgcatgtatatgttttatggtggaatagatggttgtatgcatgtatgtttacatgtatgaatatatttatggtggatgtccatatatggatgcatttggtgggatggtatatatatatacacacacacatacatgtttatatgtatgcatatttacatgtatgcatgtttacatgtatggatgcatgtgtggtgggatgaatggttgtatatgtttgtatgcatgtatgtttgtatggtgagaggggtggttgtgtgtatgcatgtttacatatatgtgcctgtatggtgggacaaaggtatctacatgtttgcaagcatacacgcatgtatatgtggtggaaggatggttgtatgtatgcatacacgtaagtttatatggtgaggtggatggaagcaggtagggcacagctggccttggtccaggttctgcagttgcccctttcctccacttctccactccaacatcttcccacctcactgtggctctcaggccccaaggccctcacagtctctccattgtactttgtcaaatgtgcttcttggatctgcccagggagttccttgttgagcaggccatgggtgaatgtatttatacatacatatgtgtgtgtgtatgccccacccacacagccatgtatgcactgaaccacagcagcaagaggctgctaagaggcggtctgttcagccagacagtgcaggagtgcaggctagaggcgagaagggagggtggagacaatgacggtgataacggagactgaggccccacgatcccctgggaaaactcactcacactaaggcaaaaacagttaagggcttgccacactgactccccgaggtacctgcttgctaatacgccgtgttatgccctgcagggctgatccaacattcccaagaaattcccccaagagcaaagaagtgcaggcctggggcacagtagaaggtgctgaaaattattcctgatgtctttgtcatatcttaaaaggccttgtaaagtgtgcattccacttcagaatatatttcttgcttttatgtgtttacttaaaaacattttaaaatcatgaaatatgtcacgcatacaaaagagcaaatataattatatgtatagtttacagaagaataaaataaacactcctgcacctacctcccagctgaaggcctagaacactaacaatacctttcccctaccctggatctccccccttccccggcaccaggtgatttctctcctgaatattgaggtcatgtgcctttgctttcctttcacgtttccttacctagagatgcaaacttacacaatttgtggtcaatgtattctgtttttaaacattttacacctgggattatcctgtatatagtcttccgtgatttgcatttttgtgcaacatttttttgggggggctccatcctggtccttgcccttcattgagtcattttcacggctggatggaattctgtggatcacgcttcatttgtttttggtgctttgctgtcctgccaagagcagcctcacacatggctaagagaatctctaaggtatgtgcctagaaatggaattgtgggttgtggggttatacacacattcattttactaataacgtttgcataaaccccagttggtatcaatttaccaacttgacgccagcagccatgtgagtttccaccaacacttggtgttgttagactgtggtctctgccaacctggtgggcacggaatggtactttgttgtggttttatgtgttgtttatcatggaaacaaagctgctcacttcagatcacttcatgcctctgccctcgaccacccatgacttctctctcattccaagtagcatcctgatatggtttggatttgtgtccccaccgaaatctcactttgaattgtaataatccccatgtgtcaagggcaggaccaggcggagataattgaatcatgggggtggttcccccataccgttctcgtgatagtgagtgggttctcacgagatctgatgattttatgagtggaaattcccctgcacaagccctcttgcctgccaccatgtaagatgtggctttgctcctcattcaccatgatggtgaggcctctctagccatgtggaactgtgagtcaattaaacctctttccttataaattacctagtctggggcatgtctttattagcagcttgaaaacaggctaatacacagccaaagcactgaccacagcttagaatgccgggatctgtccccaagttctctccttccagcctcaccatcttccactttctgcttccccactccacttcagctacctggcctcagacacccacatctgcctcagggcctttgcacctgctatctgacctggaatgatctcctcctctgtctacatggtttacccccaacaaccttcctttgagactcgattccatgtcacccgctcccaatggccaccctccaccatcatatcaaataagacccctgccccatcctccaaacctctcgcccagcttcatctctccttagaacactttagtttttgtcatgggccttatctataacctatatattatacattcaccttttaacttttgtttctcttgctactttcttcgagggcagagacgtgtgtcttggttttgtctctcgttgtgtccccactgcctggaacagtgcttggcatatgggggtgtgcagcaatcattgtttcctgagtgatttgaatactcaggtaacatgagtgctccagaaagacacattgatgttatcaggaactgtcacttggcccctaagcatcctgcattcaatacccacacctcaggctgaaaatgaagagaaacaggcctatgggtggcattttaggattactcctaacccacatgacagcgggcttgttcccctccaattgtcttttgtaggagtggctgctaagctgcttggtaggaaggaagctggccagcctcccaggatggggcaggcgctctgccctgctgtgggtgggtgggtgcgtgggtttggtgctggagtggatggtttcaagtctgagtcccacagatgagggctgggggaaggggtcaggaggtctcacccaggtgaggagaacacagaggtgccctcaggacctggatgtggtgaaacgctggctgtggtgaaacgctggctcgaggtcctctgccacctccggaaggctctcccaaccctcttagccattcatcccacatgctgaatgctggaaatttatggtgacttaaaaaaacacaaagaagagactccaagtggggacaggaaggggctggggaggggggaagatgttttattgacttccccttaattgctgtaattaaaaacatgtaaagaatccttttttaacgactttgccattatcattagttgttagcacagctgccttattaatttctcattagaacccaattcacagttctctttgggaagggggctgggtgccaggggttggccagcctggctccatgataggagaactggctgcttagggccccaggacaagcccttgtcaccccaggagacaggaacagccaaggaggggaggggcatttgggaaaagtgaccataccccaccctctctcagaactgtgtgccatctgcgtgtgtgtgtaaggagacagacggattggcagacaggcagctgcagcaggcctgaagcacagaatcctgggagggccccagactggggtagggagaggggactgaagtgctgagggtgaaagatttaaggaggcacccactcttggggtcatgcaagtacggggtgagcacttgagaatgagcacctccttaaattgggcaccctcactgcctggtttgcctcagcctagtccagccctggagagcaggagtagagagggtggctaggcatgtatctacttgggtagacagattcaagaaggttgtttcttccaggacacctttcctggctgacctaaagtctatttctccctgagtgccgtccagtctggggacccactgcaatggtttgtgtgcgttgataccataatcctttcaaccactcaggtcagtccgtactcatggtagcatcctttgttatacaaacaatgaaaaccaaagttacagagaagtaacttgcctaaggtcacttgtgggaggtgagtcgggatttaaagccagggctcacagctggggccacggttacaccctgccaggcagaagaaggtagacagtggaactgccagctgtggaactggaactgtgggttattctgcaacccctctgagccccagtttgctcctcttatgttcctcaaacgatttgccttctaacctctcagacctgtcctgggagcccacagaagaaagacatttacacaatggcacagcaggatggatcattttggaggctctggggaacgccccccccccccggcttaggctctgcatctttggggggctctgggcttctttgggggacagttctttccaggctgggccccatgggtcatgaccctgaaggtcactttaaccttgttaacatcagaactgaaatggatctcattttacagatgggaaaactgaggtccagagaggggaagggaggtgctcaaagtcccaagctagtcagtgcctcggttggggcgagaatccacgctttcggacctccatccccaagacatgccgttatttcaggcacaagggccatgcctggcacacggaagaaccctggagctctgtgtaggtacttttcatctactcgtcctgctgagagcaaggaaaacgatgtgattggtagagtctaccccaccccacccgctggcactagacattcaccctaggtgggagaccctgtgcatttgcagagctgtttggacatggattattacagcccagggctgtccctgattctgtctgaactctgaccccagcagctcaccctcaccctcctcccacacacccaattttgatttttctcttcttgtcctcaagcagtagagtggcgctgttttggaatcaggcagtcatgggttcaaatcccagtttttcctaactgtgtgacttagacaaggtgtgtcacccggccgagcctcggtttcctcatctgtaacatggagatggggacttgcactctgcaggctgggacgagaaccactgtgcccttcccagcacagtgaccctcaggacgagcactgctatgagtgagaatggttttgccaagtgctgtgtttccctaggcccagaatcccagggaagtggggctgggacagaggattcttcagcttctacagctagagagggaggccccctgggatgaggccagtgtgtccagcaagggcatgaatgggggaggtatgcttctctccttcccatcctggctgggtgaaaccttccttagcttgtcaggaactgcgttcttctcaagggtcggaaggacttcctagggcttttctaacttcctggctttagggcccaaagggctgtggactgtggttaccacttcacgacattatggaggaaacagcttcacacctgcaaagccgtgcacagtagcagatgcagcttcccagcgctggtttcagggagctgcagctggtggacagggggaggttaacctgggtctctctctctgctcccccttcagccactccaaggtgtcctattcctttgccaggggccttacccatatgtgcacagctgggcagcacagcatggtcctggtggaacgcagcaacatccatggtcttaaccatgtctgggggcacctggagctctggggctttgagggggctgctggaacagggcaggaatcctactgtgagaggtagtggaggggcagggccgggctggcaggatggcaccggggaaggtgccagcctgctgcattttgctgggacagcatttactgaaggctattctgctctgtggcctgcttctctacttccttaaggtgataatatagagtattaattgcagcagtcactcccactgatgcagggtgcactgtttgggagctggctagacgctttggcacatatgagctcaagaaatccttccaacgagcctaggaggtcgatattattaatacattttagggatgaagaacctgagctggggtgaggctcagagaggtccagtcacttccctggggtcacacagcaatccaggacagagcaaggatgtgaatgtggtctgtctgactccaaagtccactctttttattttatttatttttgagatggagtctcgctctgtcacccaggctagagtgcagtggtatgatctcagctcactgcaacctccgcctcccaggttcaagcaattctcatgcctcagcctcccaattagctgggactacaggcatgtgccaccacgcctggctaattttttttttaattttttttttatttttagtagagatggggtttcactgtgttagccaggatggtctcaatctcctgaccttgtgatccacccgccttggcttctcaaagtgctgggattacaggcttgagccaccgcacccagccttatttttatttttttttgagatggagtctcactctttcgcccaggctggagtgcagtggcatgatcttgtctcactgcaacctctgccttctgggttcatgcgattctcccacttcagcctcccgagtagctgggattaaaggtgcatgccaccatgcccggctaatttttgtattcttagtagagatggggtttcaccatgttagccaggctggtctcgaactcctgaccttgtgatctgcccacctcagcctcccaaagtgccaggattacaggcgtgagccactgcacctggccagaccactctttttattaagccacactgcctgtcatggtgatgagcccccagcctgccaacactgtaaggcactacccgcaaagccctttcactgtcaccctggagctcagcaactccctggatctcagaagctccctcttgagccaggcccccatatgtcactgccactgagggtcatcactgccagcatcacccagggtggtccagggcccttggaacccgcagtgtggggaaggggaagctcagggtacccccatccccagggtctgtgcctgggcagaagcaggtgtcagggtgttaggcagcacaagtccccttccatctgcttctcatggcctggaagtgcccagagggcgggcccaggtctgtctgagcccttctctgcagcacctaggaaatgccaggacctttgcccatgatcagtgcaacttgcttgctcgccctgcagatgggcctggtcacacccctcccccagtgtgaaggtagaaggacctgtgggtccaggggaagggaccacacacgtgtctggcctggtgtggagggagttccccccaccctgggtttgtgtgtatgtgggaaggagtttgcctaaggagggggatcaaggagctgagtctgggctcagggattcctatcacagccatgaagagaagcatttcagccacagaaacactgacctcccttcctttctctttttgattggcagagccaaccccagggaggctgtgtcatttcatctcaggggctctcaactccagaaagtttctactgtctcctatgagccaagggcttggaacttaccacctactcccaccccacagcctggactaaatggcatcctgaatggcatttgcgactgcgcgcgcgcgcacacacacacacacacacacacacacacacacacacacacagaggttctggcccacacacaggtaaacaaagaggcagattactccagacatgcacatctgaacacataaccaatacatgtatgtgtatacacttgcacatactcaaatgcacacacatgaatacatgcaatgcaagggcacacatttgcactcactcacactcatgcttacaatacacattctctcaaatacacaggtgagaggcagactggcaacagaaacatatacccaagcacacatgcatgcatgcatgcaaacacacacacacacacaaatatccttgtgcacacacccgcacatatacacactcattctttcccagacacatgtgaacaaaaaggccaaccaacctggacacagacatttgcacacacccatgcacacaccttggcacacactcatgcacacacacatatgcagtctctctagaggcccagcctcagcttccccctgccccctggactctcagcactgactaagcgaagctcccggggagccctccagccgctgacagctgcctgagatccatcactttaattcagggctttttctgctccttggagtaagttgagttgccgttagtgctgatttatggggacaatccatcctccacttttgattacggttgttttccgtaattatcataaacactctttgcctcacttgagattttcttttagatttctctcctgcacttctctttaagtagcaagctctctcttgtgctaatttagaagcatgctcccatgagctccatatgagagggtgccttaacaaaaattctggcctaaggattgccaccctgttatgtcccacagtacaacgtgggacttctcctcctaggaaaacccagaatgcaacagcccataatgagcctcatttctagaagacagcagatatttgaggaagccgggacagggctgggaaggtaacactgggtcttaggggaagagtgtcggttggtactctaggaccctggcccctgagatgccctggggttcttctgaagctgtcttcccttcctcttcggagggagatcctctggaattggcggcacgggggagaaggccgttacccacaaaggcttggtgagggcctcccacttcactctctgccccccagcctttctgggaaccctgattcattcctcattctccccttccccttggagtttcagcattcaccatgaggcacctcccagcacccccggaagatcacggagaccctcaggctgttatcactccagggttgagcgagttggaggatggaaaataaaagtcatactgggcgcggtggctcacacctgtaaacccagcactttgggaggctgaggtgggcagatcacttgaggtcaggagttggagaccagcctggccaacatggtgaaaccctatctctactaaaaatacaaaaaattagctgggtgtggtggcacatgcctgtaatcccagctacttgggaggctgaagcaggagaatcacttgaacctggaagcggaggttgcagtgagccaagattgcaccactgaactccagcctggatgacagagtgagactccaactcaaaacaaaaacaaaaacaaaataaaagtcatggaggccctgggaagtctgctgagaagagggttgtagctggagaggctcagagtggccattctgaagatgccccttcccaggtgtgaggtggaccacagaggaggcattggaagcaggtgcaaggcccttttttgaaacacaaatcagctggtcccatttaaaggacacagacaaggccacccttgtctaaaatgaatgaaaagcaccagggagctcttggctctcgggacatgtgatggggtcacagggtcagcagatgtgcatgagacttacagctgcgtgaccttgaagagggcctgctacctctctgggccttggttctaccaactgcaaaatgaggttgctggctggaaggggcaccatgggcactcagtgggtgttgatggccatgacgggatctggctctgcccaggatgtggctggtgggtgccactctggcaccacagtcgccccccctgcccctgggtccccattgtactcacaggccacctggacctcggtttgccgctgcagcagggcccccattcggttccgcacgatgcaacggtaaaagccagcgtgggtgcggtccaggctggtgatcatgtatctatgggacagacgagacagccagtgagcaagtcaggcagctgcaggggtacagaggtcagattgggctcagaggtcagaggtcgccaggtcaccctcttttggaataagagtaccagggaactcttgactctctagccatgtcataggatcacacaaaggtctttatcaataaataggagggttcctcccaaagccaatgaggcctttgctcagctgcctgggaattagcctgcccttctccaagcagggaaggtgctgcacccgaatccttgaccctgaccctaaggctgtgtcagctgtgttggaagcagctattctccctgacctgtgactcacatgactgagaaaggtgggggcatttttttttgtctttgcagaggactgtgctatattagttgaaatggatggaggtgacagagacagggaaatttacatgttttcccaaatgctcagtatcattcctttcttaaaattacagacagcccctgatgcccacccaaatctcatcctgtagctcgcataattccaagtgttgtgggaggaaccaggtgggagataattgaatcatgggagtgggtctttccatgatgttctcgtgatagtgaataagtctcacgtgatctgatggttttataatgggaagtttccctgcacaagttctctctctttgccttctgccatccatgtaagatgtgatttgctcctccttgccttccgctatgactgtgagggctccccagccacatggaactgtgagtccattaaacctctttctttcgtaaattgcccagtctcaggtatgtctttatcagcagcgtgaaaacggactaataatacagctgcactgcagcttttgggctggcggggttgggcagagccttctgaataagacaagctagtgttctgtgggttctggggacaggatgtgggactccaggctggccccttgaaagcccactccagaaatacttgttacccacagagcagcagactctggcattggggggcaggcggctgggagcaggtgtatgtacattcacctagctgagaggcaaggaggaggcacgtcagtgagaggagcttctgacagtgggacaggagtggatgaaggggaccggggtccaggggctagttctcctggttcacccttggtggtcacctttcccatccctaggcaatggtcccacaggaccctcagaggaagaagggatgtcctaggatgcctctctccaattcattggtatcctagggtttgcccagcagacctggtggacaagttccttgacacctgcctctagggtatctctagatgtgccaaccctgggatgcagcagccttattcctgggagatgccagtttggttttattaatacatgagatctggctagggcctgtcatcatcatcatcttgccaagaataaaacaacaaccaccccttccggagcaccatctctgcatcagacactgtattaagtacttttcatacgtttcttcatttcacacagcagttcccagcctattgaatatcatgaaccagtaacacttaaaaaagtgggaccaacatgagactgtgaacttcttcttttgccaagattattaaaaccaaccaaccagaaagcaaacagacaaataatcaggcaacaacaacaaaaacacttaaaaagggataatattaaaaagtgccagggaaagaaaaataaatagaaatggtcagcatttaatttaaaaaggacatttctgggatgacaaaaaactcctaatctcagcataaaggcattttaaaaacatttttccttctttatattaaaaaaagaaactttttgaaaaaagagatgggggtctttctatgtttctcaggctggtcttgaattctttggcacaagcaatcctcccacctctgccttccaaagcgctaggattacaggcatgagccaccgcacccagccaatttttaacaaatttttaaacttaaattttacacaaagcccactaccctgacttttatgaggacagttgcaaactgtcatcagtcagcacttgagagcctgtgacttaatctccacactaaccctactagcaccttctttctagaggtggagaagttgaggctcagaaatatcttgtcagtaacctgtaagtttcacacattgtaagaggcaaagtcccacagagcctttcagactccaagcctggctgtgaagctgaggtcacatcccaagggccccaccctccatcctgggtctgtgcagggctgactcacaactggccacgtgccaagttcgctctggctctgcagcattttccagaaccttctggctgcccaagccccttatctctgccaccggctgcagctcttatctgtctcttgctactgtgcgcagtgtgatggcggggagacagcagtgcccaagctctggtaaatctctcttcctccgttcacctcatcttcaaatccaccctcagccctctctcctgtttgcgtcccctctctcccgaggcgaggggaggccactgtgggggaactgtctgagtctgtaaagtgatggggtgaccctagaggggagatggaagaagagatgggccggaaaagctctctgcctttggaaatggaatcagatattattaaaaagcaccagagagaggaaaagaaatagaaatggctgataaactcatgaaaatatgctcaacttccgtcatagtgaaagaaattcaaatcaagacgacaagaccatgtttgcctagcagatcatcaaagattttcaggtgtggtcaaacccagtgtcggcaggagtgagggggaggggaaagtatacctgcagtactgttgtggtactggaaattggtccagcctttgggaaaaagtctatgaaaattagaatatgccagctctttgactcagaggttgtgctcctaggagctggccttttatttatttatttttatttttttgagatggagtctcactcttttgcccaggctgaagtgcagtggtgtgatcttggctcactgcaacctccacccaccaggttcaagcaattctcctgcctcagcctcccaagcagctgggattataggcacctgccaccacgcccagctaatttttgtatttttagtagagatggggtttcaccatgttggccaggctggtctcgaactcctgacctcaggtgatccacccacctcggcctcccaaactgctgggattacaggcgtgagccatggctcccagcgagctggccttttagatacactagcaactatgtgacaaaaaaatatgtgcaaggctgttcactgtagcatttgcttgccatcgcagagacaaacaaacgaaagctagaagcaaactaaatgtccatcaaaatggaattggatcaataaatgatgcagcagccacagaatgaacacatgttatgagaggaggtaggaaggtgtccaagacacagagcatggaaagaaagtaagagctggggaggaggggaaggtttgcgaataaaagcacgcgatagcaagatgctaaacaatctcatagttgactgttagggacaagaatgataatatattcttatcggttgctgttcattgatacaggctaccaaacccttaatgttttacatcatacaaactggtccaataaaaatccccgcactttgggagaccgaggtgggcagatcacttgaggtcaggagttcaagaccagcatggccagcatggcaaagccccgtttctactaaaaacacaaaaattagccaggtgtggtggcacacgcctgtagtcccagctattcgggaggctgaggcaggagaatcgcttgaacccaggaggtggaggttgcagtgagctgagattgcaccactgcactccagcctgggcaacaaagactctgtctcaaaaaaaccaataataatttaagtttgttgcaaaaatgcaaacaaacaaaaaaaaggtaaagaatagtgtgatgacatgatagtatttgctatgatgccatttgggtaaattgaaatagtatatatatatttctgtgtattgtgtgtatacaaatacacaagcacaaacgcacacacttataaccacacaaacacactgggataggcatacaattttttcaagacggatactccagaatgtgttatctcccttttgggagagatacccgggatggggagggaagaaacttctattttttgattttatgtctttctatgccatcagaattttctttatcgtacgcatatattgcttttattttaaaagtaaaataaaaagatgcacattgtgcacataatttaagcatacattataaaaacggcaccaggggctcattggatctggatttgtttgctgatgtcagtgaggcgtggtgaaatttaaactttaataaaagcccatttctttttcattttttttattttttagagacagggtctcattttgtcacccaggctggagggcaatggcgagatcctagctcactgtaacttcagactcctgggcttaagcgatcctcctgcctcaaccttccaagtagcgaggactatgtctatttgcttcagccaggaatacccaggtcccagttagggtctaattagggccatgaggaaggcccgtgggctgctggccccctcccctcccccaggccgccctctgtacccctctgcgatcgagggcaggtaatccctgccccagcagtgcgggtacaacctctctcccgctcctccgcctccgtttctttgggctgtctctttggtgctccctgcctgggagacctatttctggcttgtaggcaacattatttaaagtaacagttccgcccactgcctttcctaccagggaaacccacttcactccacccaaattgcagctctcgtctccctgcctcccaggcgggtggaagaggcatttggccagcttctcggtttgtgagtccagcgcactgtaagcacctccgataatgacagtaacagcactcattatccccaatgcgctccctcctgggccaccaagacacactcagcccacagctctgcctgccccactcacccgtagctgccagcccagcaggagactggctgagtccagccccatccaggtcaccccgggggtggggggtggattaaatggctcctggaggagcagcagggccggagctgaagggtccacacctgatccactcaagaggaagtgcagtgttggagaaggcaccaggacttccacctcagggggacttacacttgactttcacttctgttctttcttagatgtgtggcccaggcaagttatgggaccttgcaagccttagtttccctgactgtaaaatgggaataatgatggccatctttgatgtgggcatccagcgaggccgtggatacaaatgcctgcacaaatgcttgccaagtgaaggggcaaatgtaagagtcattggcggggaggctcagagaggagggtgaagcagaggccctccccctagaatggggatcctctaggggcttcagccaagcactaggggagcatggagtcccctgcctggcacattcctcggcttctgacccctcaacctcccagtcacctccatgtgcctccttgaggtggaagagcaggaacctggctcctccagggatgaggaacagtgacggtggctgggtgacctgcaaccttaatctctattcaacgaggaagagctgctgggttgtggcctctgggagccagcacacacctgcattcacctacccctaggtcctttcaaaggactgctctttatttatttattataggaaatatattcacaattcaaaattcaaagaaaagaaaaagtacacagcaaaacgtctctcccacccttgtcccccagctgccctgtcatcctgatccccaacatacacagggaggaaacgactgtcattagtttcctgagtgtcttttcagaacttctttatgcaaatgcaagcaaatacgcatttagaatccctccccattataaacaggagacatggcctcctgtaggcactgttctgctccttgctttgtgcaagtgacaatgtatctcaaaaatctttccgtagctgtgcatggagcttcctcgggctttttgacagctgcagagtattgaggaatcttccgggtggaggaagatttgctttctcccagttcaatggtcaaaagcagcaggcggtagagagagcacctcaggggctgggcttggggctgggggcagaaagagggcagtgaaggaagatacgccaagaatccacacccgttctcgtcatctccatcacagattgtcctgattttaatccggcaggaccctgcggctcagtccactcttcgaagatgaagagatgagctcagggtggagggcgcaagacaacagtgggaggaagagccaggacagataattggatttttagcgacaagagaggagcaggggggacaataacagcctaacaaatgtggcatcttctccagcacatgaggaaacacacaatgccctttttggttcgagtccttgagtgtcacagttgatatttaaaatgattcttactcgcattaaataagatatttcaattccacgaagctgtcaggagctgatgcggacaccagaaataataggcacactctccttgtattgtcctcgttaataaatcagacgcctggagatgcacgcggtgatgctcccatggaggaaggaggtgtgtgtgagtgcacatgtgcacacttgtgcacatacacggagcacactcatgcatactcacccatggtacaacgcacattcatgcacgccgtgctgtgcacacacatgcaaactcatgcaatccacctccctgcaaactcatacatgactgtgcacatacatttgtgcacacacatgtttggatgaggcctcctctcctcaagtgaactgtgctcaggtagagaaggcaggtgggtcatcatgtccactggggggtcaggggaccatgtgtgcctgctgcctgcaggtgtcgccccagatgtctgaggccaacacaggttccaggaacagcagtgggccactgagctcgggaacccagatttccttccctctccccatggacttttgggcagcaggcaggagaagcagcaagtgctgagcatgtgcatgtctgtgcgtgtgtgtgtgtgtgtcctcagacacctgtgagcacacactgggcctgttcctgcagcaggaagacttaggtggtgatcgaggacctggccactggactggtggccggctagaaaaagactgactatatttgtggatttgcttttgcaaagattcttcaggaaatcgggcaaaactctgtccagggcgatcaaaagggaaaagaacatgtaccaggtaataaataataacaatataccattatgcaattaacataataactattattataataaatgtcactgctctaaggactttatattttttaatcacattgctgtaattgtattttattttttaagtcttatttttatttatttatttttgagacagagtctcgctctgtcacccagcctggagtgcaatggcacaatctcggctcactgcaacctccgtctcctgggttcaagcaattctcctgcctcagcctcccaagtagctgggattacgggcacctgcccccatgcccggctaatttttaatattttttagtagagatggggtttcgccatgttggccaggctgatcttgaactcctgacctcaggtgatccacctcctttggcctcccaaagtgctgggattacaggcgtgagccactgtacctgacctaagttttattttctttatcatcacccaggtattaagcctagtacccaatagttatttttttctgctcctctccctctaggactttaacgtatccactcatctgatcctcacagtactgcagaggcagtgctaacataaacctcggttcacagatgagaaaaacggggcccagagagagaaagtaacttaccccaggtcacacagctaagtacctagaatgatgggacagtctggcccattgacaacatgaacctaacgggatatgtatccgatggcttggggtctctcattcctagggtaagaagaggatagttcggctgtctacctcctcctgcttcacatagacagaggcagagtatttctgggcagggcctaaattttgatctaggccatgttaatcaaaaattgttgctgagtgctggccagtctagtacactggaggcccaggaagaaggagctggatggcttgggcagcccctttagtggatcttttgattgtggaaggagaggctcaggcatggaaagggttgaggcaaacagagctcacctgttcggtatgatcaagtggctgtaatgttgaatttcccttctggtagcagccctaaggatctgctgggggtgagtgggggtgaaaatgagagacagagacagagagagacagtcagagagacagagagatctagggagaaagagagagagacagggaggctgagatggagagagacacacacagagaaacagagtcagagaaagagacaaagagagacaggggacagagacagagaggtaaagccctctccccatgtaggacacagccagaggccgggtagttgggagcaggctggccagggagggtgatgtcagctgcaccctgtggtgaggacagccagggcacctcaggaacagcaatgtctgtttttctattttaagcagtttctgtcctgtgctgtaattcccctcccacatcttcggtgagagttggtgacaggcacagcctgttctgtggatggtacttggggaaggatgctgtgctcctggctgggaggctacagggccgccatttgaaggggaggcagcagcctcaggaggggaagggttaggggaagatccggaattggttctggagcaggcactggggaggggacaggcaagcccaggcgagctgagcacggggttccagaatccttggaaggtgggggagggccctggacttgtcccctcccagaggacagacactgggatagggaaggattctgtgtccctcggaggaggggggacttgggcacagtgtgttccccccaccttctagggaacctgagggtggagagggggtacccgcagtggacagaacagggaggaacccctgactctgatgtgatggttaattttaggtgtcaacttgactgggatgaaggatgcctgcccagacagctggtaaaggatggtctgggtgtgtctgtgagggtgtttctagaagagatcagtatttggatcagcagatggagtaaagaagagagagacagggagacagagaaacagagacagagaaagagagagacagaaagacaggagacagagtggtgaaagccctctcccctcgcaggacgtagccggatccctcaccaacgcaggacggaaccatccaatccactgagggctcggatggcacaaaaaggcggagggaggaggaatgtgctgtcttgggaggagatgcccatcttctcctgcccttggacgctggggctcctggttcccggcctgcagactctaggacttacacccatgggctctcggtttccaggcctttgggcccagactgaattacggtactggatttcttgggtttccagcttgcaggcggcagttggtgttcttggctggcctccataaccacatgggccaagtcccataacgaacctcgtgcatctgtctctctcccattgcttctgcttctctgcacaaccccgactaatacaccgaccgtagaatatgggagataggccgggtgtggtggctcacgcctggaatcccagcactttgggaggctgaggcaggaggatcacctgaggtcaggagttcaagaccagcctggccaacatggtgaaaccccacctctactaccaatacaaaaattagtggggcatggtggcgtgtgcctgtaatcctggctactcaagaggctgaggcaggagaatctcttgaaccagggagttggaggttgcagtgagccaagatcacatcactgtgctctggcctgcgtgacaagactccatctcaaaaaaaaaaagaagaagaagcaggtctgtctcctgttggttctggttcctcatagggctgagcagggcaggatacagatgtgtctgaaagcggctgctcagccgaggcacaacctggggcttgcacaagcacctgctgctgggcggtttgcttcataaggggaggagatgtctcagggcctgctggccaccactgagcctcccccgctttgccagaaaagcccgtgaggctccgattgatcccccggccctgcggtcaatgagaggatggcggtgttatcgagctgggggccgctatcccggtgacagctctggcttgcgatggctgggggaaggcgtctgtcggccctgggaccttctgggccaattaagtgctctcaatgaacaaggataaggacttcattaaactgtgatccatcagcccagtggtccccacagaggtctggctggatgagaaagcaaaggagagagctgagggagccagtgaggtgagatgagggcaggacagggctgggagcccaagacggctactcctcctgggtgagcgggactcccactgcttgagaaaataagcagggatccctccctaaataacaaccacagtagcagcatcgggttgtgagccaaacacttgacacacgctatctggttcattcccaggtcaactacaggggaagggactcctcttcccattttacagccaggggacctgggctcagagaggttgagcatgtggcctgaagtcacccagctaggaggcagcaaagtgattccctttcaggcccatgtgaccccatccgtgctcctgccctatacctgcccgccctgacccgtcctggggccctcaagactgctctgcggtaggtcttctctgcttgtttttgcttcacaatccagaaagaaattcctctggggagctgcccaggccttgccttgatgcaggagctgtgtctgagcccagctgggagagagccgctacatagatgggaggagagtggggcgacccgcggacaactctgcaccgacacaagacagaactttttttttttttttttttttttgagatggagtctcatccttttgctcaggctaaagtgcagtggcgcgatctcggctcactgcagcctccctggttcaagcaattctcctgcctcagcctcccgagtagttgggactacagatacgtgcaccaccacacctggctaatctttgtgtgtgtgtgtgtgtgtgtgtgtgtgtgtatgtgtgtgtgtatatatatatgtatgtatatatgtatgtatatgtgtatatgtatatatatgtatgtgtatatatatgtatatatatgtatgtgtatatatatgtatatatatgtatatgtatatatatatgtgtgtgtgtgtgtgtgtgtatatatatatatatatatatttatatatatatatatatatatatatttttttttttttttagtagagttggggtttcaccacgttggccaggctggtctcaaactcctggcctcaagtgatccacctgcctcggtctcccaaagtgctgggattacaggcatgagccactgcgcccagccagacagaacgttttattactaggagcagaaaggaatgaaaaaccacagaagacaagccctgtccagggtataaggagttaaaactcagtcttcagtttaaatggctgggaaaaaagaaatgctgagatttgagggaggcagtgtggttattttattttattttttaaaaaacaagaaaacagaaaagcaaaatgaaaggagcatctcctctcacctcgattacaattgtgctttagaatttcctcaccgctccccgctcctccggctcggggaggaaagcctcgccacccagctcccactcctggggttggggaggactcctttgtcccgggctcctggcacccggctgaaattctttatgattcttttcatgccaaggtggatcagaaagaaaccaaattaagacaagctgataaagaggctgcatggaaaccaggcttcagggaaccaaggggctggggctctgtggccgaatcatggtgggtggccagagcagccccatggacccacttctccgggctcactccagcctcccaggtgtgcaggggagactcagttgcttctcaaactgggagaagcggcctcctaataagacctgctgaatgcacagtggtgctggctgagaagcctcttccctcacagtgagtgggttccctgatgcgagaggccctacttgtttgagggaagcaggacactggggcatccaggggcgtatttgtttctcagggctgctgtaacaaagcaccatggcctgggtgccttaaaacgacagaaatttcttcttccacagccctggctgccaggagtctgagtcaagctcagcagcaccatgccctgcatgaaggatcccagggagaatccttcctgcctccttcagctctgggggccccaggtgttccttggcttgcagccacatcactccaatctctgcctctgcctttatttggtgttctcttctctgggtttctctcctcccccacttttctttcttaatagagatgggatctcactatgttgtccaggctgatcttgaactcctgggctcaaatgatcctctttctttggcctcccaaagtgccgggattatagccatgagccactgtgcctgggctctcctgtcttcttaaaaggaccccatcgtattggctttagggactaccttagtctagtatgacctcagctgaaccaattacctctgcaatgaccttatttccaaataaggtcacactctgaggcactaggcgttaggacatcaacatatatttttagaggagacacaattcaactcataacagctgaggcttgagccgtggggtgacttagagatgggcgggacttggtagggtgtgtgtatgtggagaggtgggagctgggcctctccacctccctcctgagggcaggaaggctcaggtaagtgcaggtgctgatggaggctgagggggcgagggaagaaaaggaggaggtgctgtccagtgctgatcctgaggggaaggcaaggatggttgaagagtgccaggcgtgataagtagatgtcagagacagagattcctgagacatcgactgtggtgctggccagagaaagagcctggctgggataacggggaggctggacttcatggctgggccagtccccaccaggccttatgggctgggctgaagaatttgggccttttcctgaggatagtagaaatatgctgagggtattaaccagggctataaaacagagcttagcaaactatattcatgggtcaaatctacagccacagcctctacaataggtgtaccaggaagaaagagttcacacatttttagcaaaatataacaatatcaagtgtaatgtttcatgtcagatgaaaattatatgatattcaaatttctgtatccataaatagttttactgggacacagccatgcacatttgtggacacagcgtctgcagctgctctcctgctgcacaggcagagttgaaggttgccataaactgtgtggcctgtgaaccctcaaacattcactgtctgtcctggaccagaaaatgcttgccaacccctggtgcaaaataggcaggtttacatgtgtacgaaggtcactctgactgcagactggagagggaactggagttggtcaaggccacagggttagaggccaatttggtctttgccatagactggagagaggtgatggggctgaccatgtacaatgatgctggggggccaggggacagtggaaagatgtcactggtgctagcatgagggggcacctgatggtctggggtaggcggcagtttcagtgggcacagctggcaaggagaggaggggtctggacaggtggagaatgcaaagttgtgtgctaaaaagaggagagtggctcccggcaagagagggaatgtggggcagagggaagtctataggagggactttggtttttaaagatgtgagacttgagcaggtttaaacattggtggtgggagcagttaggagaagtagaggctgagagcagtgactcacatctgtaatcccatcactttgggaagccgaggcagggggacggcttgaggccaggagtttgagaccaacctgggcaacatagcaagaatctatctctaccaaaaaataaaacaattagccaagtgtggaggtatgtgcttgtagtcccagctacttgggaggctgaggaaggaggattgcttgagaccaggagttggaggctacagtaagctatgattgcaccactgcactacagcctgagtgacagagtgagactctgcttctaaaaaaaaaaaaaaaaaaaaaaagaggcagaaagagagggcaagtgatggagccaacagccagctcctgagggtctggggtcctgtacccagtggagtgcagtccctggcagaaggagaggcctggtagggcagagttaactgaagcagggtgacaggaagtgggagaaatcaattccttacaatgctcctacttcctggggaagggggcagtgaagggaggggcggtgggctggcggttcaaaacagcatctgttgaggatgagtaacctgactgggaaactgtgggaaggcacaggtgagggcagtagcttgactttgttttttatttgttgcttttttgagatggactctcactctgtcgcccaggctggagtgcaatggcgcaatctcggctcactgcaacctctgcctcccagatttaagtgattctcgtgcctcagcctcccgagtagctgggactacaggcacgcaccaccatgcccggctaatttttgtatttttagtagagatggggtttcaccatgttggccaggctggtcttgaactcctgacctcaggtgatccacccgcctcagcctcccaaagtgctgggattacaagtgtgagccactgtgcccagccagtaccttgactttgtacaggtgctatctacacaggtggctggctttcttcagcagggctcagtagccttatggaaggagcaaggtgggttgaaagttgggctgacccaaggctggggctcttccaggaagctgtgacagatggaccccaatgccagggggctgaagacactggcaagagggaggctgagatggtgatgactgggtccactggctggggaagcaggttcagccagcaggcaactgacagatggggcgggagggccagggtaagaggtggaaggcgttccacagccctgctgctcacagtgaggtgtggggaccagccacaggagcgtcacctgggagcgggtcagaaatgcagaatcttgggccccaccccagacctgctgatcagaatctgcatgtgtggtgttcccagggtgagtccttgcacacacaactttaccatgctctgtgatgagatggagccacgggtgtgagggagatgggaggtcagaatcaaggcttcaaatgggaaacgggtctaggtgatgacggaggtcagggtgctgcctcatcggtcctcaggttcccagtctgtgagatgactttgatcatagttaatgaaaaggctgatcatagccccaaagagtcacagtctttaacaacctcggctgtggcttcagacaaccctttactctggtcccagctctgtcactcactgagcacgtgacctcagacaagggatagaaccttgttatacctcggacactccatctgtataacgggcaaagtaaggatgactgtccctttttttttgagacggagccttgctctgtcgcccaggctggagtgcagtggcgcgatctcggctcactgcaagctctgcctcctgggttcacgccattctcctgcctcagcctcccaagtagctgggactacaggcgcctgccaccacgcctggctaattttttgtattttttagtagagacggggtttcaccgtgttagccaggatggtctcgatctcctaaccttgtgattcgcctgccccaacttcctaaagtgctgggattacaggcatgagccaccacgcccggccaagatggctgtcttatagaaaatacaagttcaggcagctcgctgtaaggcttgttttcaaacacacatttgttccactgcgattgatatattagagaacgatatgagcatctgtggattttgcatttgctgtgcacagttttgtctgcaagaagcaggagtcaatacagaaaattgcacccagctgaggtgggatgcacagttgtgcacaaaatgcacacagctctggggtccccagctcactgcaaatgttacacacccacacctggtgttgcaacttttttttttttttttccaatttccgacaaccttccttctaccacttaacagtaacttataagctgcaccccttctgacacccacttccgcaagcacactgggagccttttccaaggcaaagtgccataagtattatagtagttatgcgtttcttaaccatttaatatgtgtaaaattgtgcaattatcttcattaagttcctttcttttttaatgtgttgctaatgaagtttttgcgtgttgctgcccccactccatttcccccgtaagccctttgttttttatcgcacagtttggcatagcatggtgatttctaccaacgtatccgtcacacagcagcagaactgactgcaaagtgcttagcacagcgcttgacgttcggtaagcagtcacgaaatgtgtccttatgtggtttcccactgttatgaatcattctacccatactggagctacaccatgccagacactgtgttaggcactgggaattagcagtaataatgacaacaacaaaagcaatagcaatacccttgtctccatgtactgtggtatcagcagctgcttgtgtttaggtgaaaacgttactgctgctgccacacttggcttagaaatgcactgttccccagctctacttcgagtccattcatttcctgttgctacccacgaagacaatagtggtcagttccctggaggccagagggaaggagttaaacatcaggtctttcagcatctccaaatcccagggaccttaagggaatgaagacttggtcatctttggggaggaatgactttgtcaagctaattcatactacgattggaggtggcggggtaagtggattggaagcattaacttggaggggggtaccaggcagggattggtgagttgtgatggcatgaaccctgccaagcaccgcccagatggccggagcttcctgtcccgctgagtcctgctctctgggattcaccaggctctgggtttccttagaccagatgttccaggattactggatgttgataaggctggaggatgagccacagtctccaggttcttccctataacgagcttggtaggtcaagggatgctggaaagaggccgccctggtgtgcctgctgttggcagccctgcctgaaggccagcattgaccctctatatctgctgcaaggcttcaggtgtggctgaggctctctgctctgggatctgtatctatacttatgcccaccgctatatcatcaatgtctatttcaacctaggtagagtagctaactttaatttggccaacaaaaaagtgaaacaacaaaagcaaaaaatctgtcatgcagatttcattttctttgttaaaaaggccatttttaacatcaaaagaggacaaagggcacagagttttctgcaaagagtggatttaccatcatgagaacctgccacgtggccctggttttgactagttcacagcagacttcttacaccaccaccccgggccttcctccacgactgagcaccagagcttgagaactgtgtcctttctcagagccgccctgctctctggggttgcgttctgacttttttggcggcctgtcttgacttccctagcaaggctgcaagctccacctgtttttggagtgcccctggtacctgacactttgtctaactcacagtgggtgatcaagaagccggggcaggcccactgcttgcagggctggagggcaccctgataaagcacagcacaaaggcgtcccaagtcaaactactcggctttgctctgcccaggtagctctgctctaagggatggtagacacaggtggagaaggagggtttttgattgggtattccacttgctgtgtgaccttaggcaagctgcctaatctctctgtgcctccatttccttatctataaaataggagttgtaacaatacttactaatatgggccaggcagtgttttttttttttttttttgagatgggtttttttttttttggtcacccaggctggagtgcagtggggtaatctcagctcactgcagcctcgacctcctgggttcaagtgatccccccaagtagctaggactacaggcatgcaccaccacacttggctaatttttgtattattattattatgttttaagagacagggtcttgccatgttgtccatgctggtctcgaacccctgagctcaagtgatccaccaccccttggcctcctaaaatgctaggattacaggcgtgaaccaccacacctggccccaggcagtgttctaagcatttcacatgtgataatgcatttactccttattaaccaccctacgaggtcagaaataataatatccaaatgtggcagataaaaaagatcaggaaaccaaggaacaaagatgttaaggaacttgcccaagtttgcatggccagtagttggcagagccccagtgggcttctagattttgtgctcttaaccaccctactatagcccctacctgaagatccagtgtgaggattaaatgagttaatacatgtagtgtgcttaggatatgggctggcgtaaggcatagtcggcaatctttaagagttagctgttgccattattattaatgttattactactccttcatctgtccttgctctcagcatcctctaacagcaccctgacatggctcaacatatccttatctaggacaagccctggcccagcaaagcagcctggggagcttcagtcccaggtgtcagaagctatgaccctggctgctgggagccttacgccccagagccaactcctctctctgcctttctgttttttggcttttttttttttttttgagacagggtcttgctctgtcacccaggctggagtacagtggcacgatcacggctcactgcagccttgaccgcctgggctccagcgatcctcccacctcaacctctcaaggaactgggactacaggcgtgcaccactatgcccagctaacatttttatttttagtagagacgaggtctcgctatgttgcacaggtctctgtgcttgcaagcgtgagccactgtgcctggcccctctctctaccttcctcaacgtctgctcagatcacaggcagcaggtcccagattcaatcccaccagctctgagctttctgctctttgtcctccgtgactcagttccaatccttgcccattctctctgggtgttccaaagtcacccttgcgggtgccttcagagataccaagtgggagaattggaccagaactgtgctaaggaagcgctggggacccgcctgcgagccgccatctggaaaaggtggtcggtgtgggctttggggtaatggccagatctgagaggaggccaggaggggactgaggagcacagctctgatattttacagtgacccccatcaggatgtggagtccatttccccactcccgaaatctgggccagcttcatgcctcgctttcattgacagaatgtggtccttgtagcttctacattcaccctctaagatcagggccccaacaccatggtggcccaccatgctaccaaggaggagaaaccacgtggagaaagagatcctgcacccagctgtccccaccaagcccagcccaagccgactgccagatgggcacaacttcatggccagcccaggagagaccagggggaataataatcccggttgtttaagccaccgagtgctgatttggtttcctaagcagcagtaggtagctgagcagagtagctatctgtggcccggccggcacgctcctgcaggcaggacctcactgtgcactcccaggcccatggtgtttgagtgccgcggtggctggagcctgtggatgtgctgtgggttggcctccagggactgtgccctatctcccctggagagactgtctctcttagtcactagtcttcattctgcagaaagaacagcctcttccttctccagctgtctgtgagcccaccagtgcctggaaccccctcctatgccttctgtttatcttgagttacagaacacaccagcatctctcagcccccaggggctgccagttagagccaaaacccctattttcaaccccctcccaggaggagtctctgccatcccagcggacttgggcgaccctgggagaagactggactggtaagtcagaaaccccagctcccctgccaaatggcccactgcagatattcctcttcagggcgacgaagacacaggggagaggtacctgcaccctcccacactgaggaatcctatgaatgggctgggggcggggaggggagtcaggcgccacggcagcccccaggaagcaggggtcattaccaactccccaggcgtctgtctagaccatttgcctgcctgagcgcataactgagtcaagatctaattagtttctgtgtcctggctgagagccaaggccgggcgcaggaggacctgggagggggtggaaagcgggagattctcagggtaagcggggtctccagcccagctgtgtgcggaaaaagaatgaactctcatttccatgcactgaaccattccagataaaaaacatatgtgcctccgatggagcccaccctcccctccccaaggactgtgggccacacatggcctgcacccatgtctgtgcacccgttaaccagggattcaggccaaattcaaatatgtcaatctcaggtgatgaatgatgaaacccttcctaatttgcatgttaaatttccttgtggtggaaataaatagcctcagttcatcagggaagagctttcctcgggagcctttcattaaaggcggcggcgagtgcttcatttgcatgttctgtgcggcacattggagagtctgggcggatgtggccagcggggccccagggctgccaggatgggccatggaaaatgcatccgttgctgggaagtgggaggagatgacaggaagaagtgagggtgtggctgtgtgtgcgcacctgtgcattccagactgttccatgcagaggagctggtggcaggtccacatccctagctccccgctaatttgcagtgtgaccctggacttgtcactttacctctctgggcctcagtttctgtatctataaaatgggaggcattaagtgttttgtattaagtaaaagcaaagcaataggtgttttggatcctcacagccctccttgtgagaattaaatgcattaacactaatgaaggcatgttgtgcatggctgtgtgtggggtcatgctctgtggactatggatggacatccagagctgtgcatgggcacacagggtgcttttgagagacagcagcatcgccctgcctgccccagcttcagagagctccacagtttcatagaaatgtcctccccgtcccacctacagctctctgtgggctgtgacgtccttgtgtgatcctgcaatcaaacaaggacaccgagggaactctgcaaacatctcatcagaagagagaggtgaggacagaacatgtgacctggggatgccgggcctggcaatgttcccatccctgacccggcgagtccctctcctgttcccaggggcccagcctgaccagggaaatgacactgagtgaaattgatgttggcacctttgcctctgatcacgccaggatgctgaggagctggggagcccagtgagatccaagcagcactgcacggagactcagggggcctgggtctgaattttaattctgatgtgaactcatgccatgtcccccaaggagtcatttccactcagggccaccatgtcccccctgtaagacagggcttggcctggatgccagctgaggtgttctgtggctgcgtgactctctcatagctcctagtttcccctgcctgccccctgcaccggtgtcctcagcccaggtccagcgaggccacacccatcgtccatctccagcttcctcgggagtgggggacccattttctccccaagccaggacccgttacggagagtgtgagcaaacaggttgctatggaaaccaagccagtcacggtttgagagacttttgcatcttttttccgcctttccccttacactttgaacttattagtcttaattgacataatttttgcgaggttgtcaactcaaggcacaaggagccagctgtgcctctcgctgcccagcaccagcactgacccttggggatgctccctgctgcctctctccctcccatctgccaccaccctgcctttccctgctactgactagcaaatcctgaggccacactcggtcccctcatgtcgggaagaacctgtcctaaagcaggagggggcctcccaggccagggtgggggcacgggctgcgtgcaggaccgcgtgcatctgtgggaagcaggtcgtaaggagcaccaccccatgtcctctggcaccagtggcctcaacctcttggctaatggttttagcaggactgatcagaggaggcgggagtgaatcattctctctgagcctctgacttctctgcgcagtggaggtgttgtacctgccccgggctgaggatccaacagagcatcaaggaaggtggcctgtacagcaggaagcgccttctagttgaattgttatgagaaagggggctggagggacccccaagagggagcgaggggtggccagccagctctttaccccttccttccatgccaggaccctgaccccatgtgccagggcacctatgcacagaagggcagctcagctccagctgggagagtccaggggatgccagcacctcactgtaggtcatggttctcaatgggggtgctgttgccccaggacacaggtggcagcatctggagacatttttggttgtcacatccagaaggtgtctattgggatctaggggttataggccagggctgcctcttaacaccttacatcacgcatgacagactcccaccctccaacaaagaactttccatcctccaatgtcagcagtgctgaggctgagaagccctgctctagctgtttctagctggtgccttcctcccaggcagcataaggctgtggcctgaggatcctcaaatagtgataccccttgcctcgccctctgcctcgctgttggatattggaggcctgccccgtgtgtgtgtgtgtgtgtgtgtgtgtttgtttgtgtatgtgtgtgtgtgcatgcgtgctatgtaggcagatggggtcccttcagcctccccaccttccccgatcctcaggagtgggaggagctggcctcaggtcgggagaaggacagcctgctcctcctcccagcccacctctcccattcctccctgaggatttcgccatttccaaactcgttaacttttaattactaccttccctctgcctgagtacactggctccatgccacgtacatctctattaaaattcaatttatgcccatcataactaattcctgtacttcagttttctcaccatcagccttcaattttcagacaagatgtccaagctcatggccaaattggagtaaatctccaaagggctggaacaggcagataggatctagcctcattgaggaaaaggaacctggacttcccgggagggtgggaaggaaccgtggccaggaagaatgaggtgggaggagcctgccctgctgggtgggagtcagcgtcatgcccttggtggctctcagaccatcctttccattgatggagccatctgtgaccagacactcttctgcacgcttcatcttgcatgacattcccagccaccctgggaggtagctactggtcttattattcccatttcccagactaggcaaccgaggcagggattaggcagtttgctcaaaggcacacagtgagtcaggggcaggactggacatcacaaggtgggatgctggggctggatctgggaagataaacaacggtttgccaggtagcagaggcgtgcgaggacggtagaggtggaggacagaggtgggcatgggcacgagggcatgaaagagcagagaccacgggtgcacgatgcgttctgcccattagcgaagggagttagtgagagaggaggctggacagatggacaggacccggtgatacagggtcttgtactccctcgaccaaaatcctttcgagactgtccactgcctgctggatatatccgagaagattcttcctggcgttccaggtcctacctctgccatcttgggtcagccatgtctcccacttcctagggcaactggctcaacctgtcatgccccttccagtctccaattcttgattcctacttgcctgtgaggattccccctccactccctgccccgacttgctcatccctctctaactcctcaacttgccccatcctccccctcctgaaggtcaccagacttctatgtccctaaattgagctgacgatttatttatttgtttttatttatgttttgagatggggtctcgctttgtcgcctaggtaggaatgcagtggtgtgatcttggctcactgtaaactctgcctcccaggttcaagtaattctcctgcctcagcttcccaagtagctggccttacaggcacgagccaccacacctggctaacttttgtatttttagtagagacgggggtttcaccatattggccaggctggtctcaagctcctgacgtcaggtgatccacccaccttggcctcccaaagtgctgggattataggcgtgagccactgcgcccagcctgagctcatgattttggaatccagcagcggttgacacagttggtccttcctaaaccaagaacacaccctctttcctcccaagacactgcaatctccaggcttcccctctcccatccagcctctaggttttgttctgccaggctggtttccaactcccttatatatggcctggtgggaccacagagccctttcctctgatgctatgttcattctctcatcctgccatgtcaacaccagtgagtcctaaattaatatcttcagacttttcttctagttgcctgttggacatcccgatccagcatccaaaactgagtacagtgtcttcccagaaagctccttctccgcctgggattccttcctcaaccacctcaatgcccatcttcctccctctcctgcatggccagcagagcctcacgtcccaccagttatccctcctcaatgcatctcagacccatccgctcccaccaagatggcccagccgcccctcgcagcacaatggacccacacctcctctctgctctcttccacccgcttctcacccagcttcctgagcaaagatttgaaacatgagcatctgatcatgtccattccctgggaaaaaccattcgagggctccacatagcttttggcagaaaatgcaagtccctaagagagctaaacgcccctacttgatctcgccccagtgtcctccttggccacgtggaccttctttcagatcctccagacacaaggtccttggatggagccgcagggaccattcctttggcatccccctgccctggctacctccactcattctctgggtcccaacttccccagtggaatctgtttgaccttactttcccttgaaagcacgcatcaaaactggatccacccacacttgcactattatttagttctgcttctacacatgggggccaggatcttcctgtcttatttaggaccatatcaccagcagccggtatctggtcacaaccggcacccattgtagtaacccagggatgctggcgtctcctgacacgagcacctccttctctcacggtttgtccacactactcaagttctgtgtctcccaggtgctgctccaaactcctccagctcctgttcgcctctttctgcctcttcctgaaactcccacgctcacttggcctcagtcccctgctgttgctcctcagccatggtacttagagtcctgtgagcacctctagctccagtgagaacaaacatttccaaaggtggcagggcaggcggggctggcactgcctttccgattgtcctccttgcctagctctgtgccgggcaggcagaaggcccccagtccttgcctgatgaatgaacaaatgctggcatctcctgctgttccttcaccaggcttggaagcagaaggcctggcacttgtcttaactttatgatttcagatcttggacaagaaatgaaacctgagcctttgtgttcctcatgtatcaagacgcctctccttataggagttgctgatgttaagggattcagaagaaccgaagtaaaagtcgcagtgtggggcctggcatgaggtaggtgatcgtttggagtgtttgttaataagagttaaggtactatttctccttctgcagtggcttagaaagtgccactgcccgggggaaggacaagctcagccaggcagcacagagcaggggagggacgcaggcttggggtcctgaagatcctgggtgaaacctgactccgtgtactggctgtgtgaccttgggtaggttgccgaacctctctgagctgtgaattctagttaggaagcagagataataattgcactagtcttccagaactgctgcccgtaagagcttggctcggttcctggcacttaccctgtgccatgcctgtgctcccgtgccctctgggaaggcccactggcctctgcctccccatctctgctgcctgctctctcttctaaggggaggccagaaagagggccagagaagccagagataaagccgctggcctggggaatttctcttcatcttcttatctgaggagtttcaaaggctgccagtggctccgcgtgcgtcccctgcttttgtgtcccttgctggggccgtcacatgtgcagggcttctctgcctcagatatactttcttctcccagctgccaagcccatgcagttcacagacaccacagctctgccacaaggacctcagcatggcatgggggctggggacccagcctggggccggccagatgcccacctggctctcctgggcctcccctgcacacatctgctcttctccacatgggccaggggtgggactcggcctcagctggtctcacaccctcacgcttgcctctcggaagggggtcctgccttcatggcccccggggcagaagaatgacacacagtgatgtggggcagggacagaaggagcccaatgggaaaccatgtgtgcctttgcagagagggcagcacactcaggtccaacagtgctcccagatctgccgctcactctctggataatcccaggcaagtttctgaccctctctgaacttcaggttcttcatttgcagaatgaaggtaatgagattcacctgttgtgagatgacggcagtaaaggacttggcacccatgagcctccataaacattaatccgtgcatgcccaattatgcatgggaatctgtgtgtgtgtgtgtgtgtgtgtgtgtgtgtgtgtgtgtgtgtgtgtgtgtttgagtgatcgccttgctcatcttttcttttttcttctattcgattttaagtgtgagaataattatgccagaaggtgttaccaaggtgggacaaaatcatctggttgatgacgttgccagggcacagacccaaggatgagtggcagggtccatccttcatccatcctccctccattctcctccatcctccgtccatcctccctccattctcctccatcctccatccatcctccctccactctcctccattctctgtccatcctccctccattctcctccatcctccatccatcctccctccatctcctccatcctccctcccttctccaccatcctccgtccatcctccttccatctcctccatccttctccatcctccttccatctcctccatccttctccatcctcctccatcctccctccatctcctccatcctccctccattctcctccatccttctccatcctccctccattctcctccatcctttgtccatcctccttccattatccatcatcctccatccatcctccctccatctcctccatcctccatccatcctccctccattatcctccatcctttgtccatcttccttctgttctccttcatcctccatccatcccccctcagttctccttcatccttctccatcctccctctgttctcctccatcctctgtccatcctccttctatctcctccatcctctctccatcttccctctattctcctccatccctcctcactccatctcctccatccatcctccctccattctcctccatcctccttccgtctcctccatcctctgtccatcctccctccattctcctccatcctccatccatccttcctctagcctctgtccatcctccctccgttctcctccatcctctttccatcctccctcagttctccatcctctgtctatcctccctccattctcctccatcctccatccatcctccctccatctcctccatcctccatccatcctccctctgtcctcctccatctccatcccctgtcctgtcatttctccagccaggggggttgtctccagccatgctgcccttgctgatgaagtggatgtaaacttaagctgaaaggattcaacctgggagatggctcctggagaagagggagctgagagcggtcagatgagagaggctccagcactaacactagagggcctgacctctagggcttttatgtgagttgcacacacaccttcctgctgtactcagacaggctcgtgactaactgttaacctgcacacaaggctgtgtgggaatcatacacacacaaacacatacatgcatgtgcatgcacacacacacacacacatattttagcagacacattagactccatacattagactctgtatatccaaataagttttgtgttcttcctcccccccaccacctgtccccagcacatgccccaggaatcactctgggaagctgcgtgcctgttccaggggagaggcaggccgtggggccagtgtccacaccttgaggagggtctcccatgcagtatcctcctgctcacatgagagaaaggatctcatttctttaaagtcagattttgctttgtttccttgctgtgctcccagctcttagagccacctcatttctcaaactgggaattcaaggctggtttcgaaatggataatgatttgtcaccaacaaagggttctcacagctcttgcctaagaggagttctgcacaggtgtacagagccccaggtggccactcagaggagacaagctacctacacacgtgattttctagggggtttgttatcagatctgttccaggatcttgtcgagacagacaccttgaataatcctaacaggtaccattcatgtcacatcttttgcaccagggtgggcttgacctgtagaatcccaggtattccttacaataattctctgatgcaggcattactgcgcctgattccaagaagtgaaaacaaattcagggtggctaaccacttctgcctaaggtgacagagctagcagggacagggtcatattcatgcaggcctgacttcaacgtctatgctcttttcactctgaccccaatgatggatgtggacccacatatttatgccacaatcacacatactcagaagggtgcacaggcttgcctttgtgtagtgcacatacacacacacacacacacacacacacacacacacaccagacccatttggctacagaacccaagaataaagactttcagagactggacatgaatataaactttcctccctttggaaacataaatttatggcagcacttctaatcttattttctctcaacttgctgagtaaatttagccattttcctgcctgaaaattggatattatcatcttactcagagcctggggtttgtaaaagacagggaagtcctcagtatccagcagtggttggagagccgtgggctatgaagctggacagtctcctatggaatgcacttttcagtatgcatttatttaaaaggtgaacctggaacattttttgagcccaaaacaaggaaatgttcagaatctaatggggatatattcaaaggacccatgctccagcttgaaggagctccactggccaaatttaggttaagatgagtatggaaatgaacaatgtcatgcgtggattaaagcacattgaataaaaaccataatgcatgagtttatactgatgctaaattactttaaagggggtcagaaaggaaagctgtttacaaaagaatgccacctaagtaaaaggaatacaagaaaatctccttatcccaaccaccatagtaataactgattcgggtaagactcttcaatggatactaaaccactgggtgggagagtcgtgggaaggagattattcacatagtcccaagttatccctctatagtccactcatcaataacgaagggaagaagatacttcaaccttttgacaatggagaaatctggtggatatcaccttgaccagttcatcaaacctaacatcaccaataacggggcaaattgtcatcaggcaccttccagtgtgaagcatcaaagacacatacctacaaatatgcttcccaaaaggcttaacatgagtttaatcatgaggatataactggacaaacccacattgagggaaattctgcaaagccggctggactctcagaagtgccaaagccatgaaaggtaggaaagaaacaataaggaatagttctagatttaaggtgtatcaagactcatggcaattaaaggtcacacgtgatccccgattaggtccggcgttgaagaagaacaacaaccatggccatgaaggacactgggataaaggtacgtccatccgaacaaatggagaaacttgaatataggctgctttttagattgcagtattgtatcattgttaaatttcccaactgtgaaaattgtgtcgtgcatggttctgcgggtaaatgccttgctcttaggaaatattatttatgaatgaagtgacatgatgtctacagcaaatccttgaatagttcagcagaaaacgtgcatgtttatacgtgtgtagggagacagtaagagagcacaaatgagcaaaatgttagcaattgtgatggtacatgtatgcaggtgtttacagtactaacgattttactaagatttgaaaaaaatcaaaattaaaagagagaagaaagaagcacctgctatgagccagggacacaggtggcttccatctaaccaccactcttttcccttcttatgttaacaactttcacccttcttccctaccacgtggctgtagtgtgagggctgccaatcctgatgtctcaagccctggagtaggcacatgatgcaggcctggccaatcagggtgctccatgctgttgcccaccacgactggtcagggatggtctgagctgggccaatcagaatccttccctgggactttctaagtgaaacttccagaaaagttctttctactcagaaatcaggcagctatagcttgtgagccctgaacttctcagtgtcactcatgactcatgaagtatgaacccagaggtgggcacagctgagcgacttggaggaaagagggcctggcaatatcaagctcttggtctaagtcctgaggttccaggaactgccaaggttctggaagctctgacttcggttctgtggtgcacttgtggtctcctctgtaaataatgagaaggcaaaaaaggtgtcaggggatatgtaaggccatactttctggacagtcacaaaggacagaggagatggagcagtgcgtgcgtgtgtgtgtgtgtgtgtgtgtgagagagagagagagagagaaagtgtgtgtgtgtgtgtgtgtgtgtgtgtgaaagagagagagagagagagggaaagaaagagagagggaaagagagagagagagagaaattaagaatacatgcattattggctaggcgcggtggctcacgcctgtaattccagcactttgggaggctgagatgggcagatcacgaggtcagcagatcgagaccatcctggctaacacggtgaaaccccgtttctactaaaaaaaaaatacgaaaaattagctgggcatggtgtcgggcgcctgtagtcccagctacttgggaggctgaggcaggagaatggcgtgaaccggggaggcagagcttgctgtgagccgagattgtgccactgcactccagcctgggggacagagcaagactctgtctcaaaaaaaaaaaaaaaaaaaaaaaagaatacatgcattatcaggaaaggttttctaaaagagaaggaatttgagctgggccctgcaggagaaaaaaaagttttcaaaaggggaaatattcccgtggaggggataggacagtttggacaaagtccgagaagagggaatttgcagggaactgtcctgagacccttgatggtctagcgggggtggcaggaggtgagactatgccagcaggagcagatcaggaagagttctaaggcccttctaaggagtgcagaccttgcctcaggggcacagcaagtttttaattgaaggaaaatcctgattggacctgcattcaggcacaccgttgcccccaggccaccagatccaacactcttaggggcgaggaggtaaaggaatgagtttcccaagtgcgcgctcatctatttcccttgaataacttccacccaacatagctataaaatggagtatctgcattctcccgattgctttgttttctagaatttgcagagcagttagccgaaagattgcttaggatacacattaaggaagcaattgcagcaatccttcttcaatgagaggcagtgtggtggatggtaacaaattcccactctgctgtcagacaacttatttttgaagcccaactcaaccatctgactttaggtgatgtctttaacttctctgagcttcagtgtgtttatctgtaaaatggggggaaataactgaaactactcataggattgtgggcaggattaaatgagataatcgcagagggacatcacaatgtctgccatataagaaattctttttcattgtctatgattgctatcatcattgttattgtcatcatcatcatcatcatcctcaatagctggacctcatcatcgtcaatagctggacctcatcatcgtcaatagctggacctcatcatcatcatcatcaatagctggacctcatcatcgtcaatagctggacctcatcatcatcaatagctggacctcatcatcatcatcatcaatagctggacctcatcatcgtcaatagctggacctcatcatcatcatcatcaatagctggacctcatcatcgtcaatagctggacctcatcagcatcaatagctggacctcatcatcgtcaatagctggacctcatcatcatcaatagctggacctcatcatcatcatcatcaccaccaatagctggaccctgtccactccctgaatgcctgcagggacaagggctgactgttttcaaaggcaggccattccacatggtccttccactgagctggaacctgcttctgtgtaccacccgcccttgcatcctagcagtgccagggccccagaagagcagctctgaaccagataaggaaccaactctcctcctcccctcctcctggatcctgcctccggctcccagccggaagaagtcaggggcaggctaggcccggcactacttgcacgtgtggtatgccatcccatgctcttggtcacccacttgagcgtgtccaaagtctaagatgatgcaggggcccttcacagagacggtcacaacttcctgggtgtgccaggtggtggccaggagaggctctggcccccaactgaaaaccacagaaggggctgctcagggagagctttctgatctccttgtgggcttcctggagaaccggaggcccagagtggccagccctgcaggacctcttgcttgctcatccagctctcccctctgcaggaggggagggggtgccctgtcctgggctttcttttgccaatgtggccacactacaccagcccatgcagtccagggttaaggcagaaagactggggtggggagtcactccaaactctggcctccgcactccctaaaggaaaggctggttctccagaaggacagatcaagcaatgataccccctcctcttatttgcatacctgtccctggcagcagatttgtgtcaacatccccagggcaagacaatcttgtttccccaacaaaaccgattatgcacatcaggccctgggattaatcaccagccacagggttggagccaataaaacaggcggaggtgggaggataagagcagaaaggagggagtgcctgccccagtctgtggctgcgaggaaaggctggaggccagggtggcctgggtgaggggctgcttccctgctggcagcagatccacccttgctgagaccctattctctttccctgctcttccttctccccacctggcaatgtcccggcagggaaaggccagtcaggcccaagagctccatggcacgggcacagataggaagtgaagataagctcaagaggccctgagagggccatctctgtgtcccacctgaatttcccatagatagaagatgtcccctccttcactgatcccaggttgctgcagagcccacccctccattggacccaggccccacaacaagagtcccctggagatggcagtgttcgagagagtgagcagggggccacagtcacagccacagccacagctgctgttagtgagtccctgtgcccaacaccacctctgctcctatgcactgtggtacagaccatcctgtccaggcagcgctggcccctggtccacaacccagccatcctctgcagggatcagtagggtggagccatctcaccttggggcagggctgcctttgccactcacttccagaactccaggctctaggagccctgagccccacactgtcacacaaaccccctcctcaccatgccctcttcaaagcagggcagtggtcctggcagccaggaggaagggcggggaggggcagtttacctgtattccagggagaacttggtcagctccctgttgttgtggagccacttgaactccagtggccagctgccctcggccatgcatgtaagcaccaggcggtttccttccaagtgcacctgtgtccgcacaggctctgtcttgaaatacggggacacatcatctgcagaaacagggagacaaagccaccagtgatcacttgctcacctatgtgacctggtgcgtttagtatcctaaggcccttaggcagatggagcaggtgcagccaggtaatttgcccaaggtcccgtggctgggagggacttgaacctgggtcagtctgactccaaggcttggtcttcagcgggagtcaccgacatctgccaaccagagccctgcctccttcctccccagaccacgctgggctattgccctgctgccagcccacactccagcatcttctgtcacttccctctcagcatacacatccactccatccactctgctcatgggttccccctccagggcaggaggcaagaggggcactttctgtggcccagccaaagggaatatcaatgtcacaaggagaatagggaggcagattgacaactgtagggggtaaagggtctcctgagtcctgctccccaaggctgggggaagccctcaaagtgtcaatcacagagtccatccagcagggccccatggccaccagctgcctgtttcttccatcctgggtcctggagccagcctgcctctacctccccgttcactctaggctggccgcctggttgcccagatgatgggtgaagagcagaacagctgcttccccctctctgcagtcacccttatcctctgagctgactcagcctcgcagacctccctgccccgccacggttctctcgacagagaccgtgaatttcgccccagacttcacaagactgctcagctggctgatctggatggaaatggggcctctgcccttctggccagtgtgggagagggtggacatgagtgtacacaagggaactgatggaacaatgggagagacggagggaaggggaggggctctaatccgtcaaggagatacctgcctttttgtggatagggtggggccgggcggcaggagccagcatctggtaacaatatccacaaagatgacagcacctgctctgttccgggctgttctaggggctctaccatatgctcgtctaatcttcacagcaacctcatgactagacaggattacaatctacattttggagaggggacaccaaggcctcgaggggttagaaacctgcccaaggtcacacaactgggcgggaggtgctcagccccacagacagcttcagagctggagcacttgagcccacacctccctccgtgaagccaaaacccgggtgggaggagaggacagatatcagggaagaacctgcagatgcccagagcttgtgccaatgagccttgcatttgacagattcgagggagtgggttctagaaagcaccactcaacagctcacctagtgagcacctactatgtgccacgggcttgaggcagcagccggcggggaggagtccaggcttgccagcccaactccatgcaccttccagtgaccacactgtgcccagaggggtgggatgtaattaaagctgtgcaggctgctgctgtcagggtaggccctgggcaccccgaccttcaggccagtggtggggggtctgtcatctacggacttgtctacgttcactccaccgcttcccagcggcgtgcggtggacaagcgttcctttatctgagtctctatttctctatcagtggacacaggaaaagaaatagctaccttcacgtctaaggatggaaggaaatagtgatggtgaaaatgctggctctgtgcccggcccagagtacatgttctgccaatgttcatttccttcctgaaccctaaagtacggtgtcccctccagggaaggggctccaccaccctcagtgctggctgatgccccaggcccatcttggtcagacagctaactttaccctgtgagcctggaaggtggaaaacaccagacagccttcttttggcttaagaaatggaacaaaccaggctggccatggtggctcatgcctgtaagcccagtgctttgggaggccgaggtgggaggatcgcttgaggccaggagttcaataccagattgggcgacatggtgagaccccctcttcaccaaaaaaaaaaaaaaaaaagaaggaaagttgggaggctgaggcaggtggattgcctgagatcaggagtaacacggtgcctgggcaatatggtgaaatcccatctctacgaaaatacaaaagaaattagctgggcatggtggcaggcacctgttgtcctagctacttgggaggctgaggcaggagaatcgcttaaactcaggaggcggaggttgcagtgagccgagatcgtgccactgcactccagcctgagcaacagagcaagactccatctctacaaaaaaaaaaaaaaaaaaaagaaggaaagaaagaaaaagtaaaagagaaatggaacaaaccaaccgaagaagaggaaggggctagggagggggcagtttgcagctggaagggagtggacccaggtggtagctggctgtggctgggtgcagcgggccttctcctgcaccccaggctggagcataaggaaggcccagagcccaggacccaggtctatcctctcaccatcagatctgcccagtactggacatcctggtctttggtcaggttcagcccttgtttccaggcctcactgggttcaggtagagattcacaacttaacagaagccatcatatacatgtggggcccaagtcagctggccctgctgcacagcacccccaaaccttgcaccccacaggcctgagggctcaatcttattaatatataacctgcggcaggttgggaggcttttccttgaactcccaccctggctgctactaaccctcactgtggggaccaccagaggggcaaacctgagggtggcctcagggtggctcagagggcagctgctgcccagaggctgccttcgactgctccctctacgtctgtctgactgctgatgtttcattttgttttggagacagggtctcggtcggttgcctaggctgcagtgcagtagcataatgttggctcaccgcagcctcgacctctggggcgcaggtgatccctccacctcagcctcctgagtagctgagatcacaggcgtgcaccaccagctaacttttgtatttttagtagagatggggtttcaccatgctggccaggctggtcttgaactcctgacctcaaatgatctgcctgcctcagcctcccaaactgctgggattagacgcctgagccaccatgcccggcttgctaatgtttcaatcatgcatctctccctgctcattcatgcacatctttccattgctcttaacaagcgtcaggtgaacgcagcgtcttaaaaacagttgagaagatgcttctttctgagtgtggacttggaggtgtgactaccactgctggtcccttccaggggcacttgtgcctccagggtcttaggccacctctggccaggtgctagggaggatggagaggctgatgggcacccatttgccaaggaaaaggacccactgcccgccgcccggctggcagcagccagctctgctctcagcttaacaaatgggcacattcttacttcaaaggcgcattcatattctccagcagctttcaagagccctttgaatcgcgcttttaaaaaccctctgttcattgctgtcatcactcgtttgttttaaaacaataacgatccagcccctgggtgattaaatcccttccatgtggggctgactcagagccagaacagtcagaggggctgggcagtgtgtgtatctgcatgcacacatgtgcatatgtgtgagcacacacacacgcgcgagcacgcacacgctctgcgcccagacgccctcgcctctgtaaacctgctcactgggcaatttcctcccaggtccgcgtttgccagttcattcttcaagccctcccgggggtgccagcctgcagcagaatgacttttgcttggatgggttgactccagaggctgctggagataatgactctggggaggaggagagggaaggggaggcctttccctgagagcctgctgggtaccaggccctgggctgggggctccacatccctcgcctcctgtggtcctcacaaggttcctctccccaagctcctgcggtgaagtcaccccctcccgaaagtcaacctgccccctggatacagggatcctgggagggacgccctacctaggactctgagcagtgacagctgattttcctccaggacctgcctcgtctgaaagcaagagatggcagggggctggcagggtgtgtgctgtaggaagaatgacagactgaggggaagaagatgctgctgggataacagaacgtgtggacgtgtctatgtgtgcacgtgtttatgtgtgcaggtgtgtgtgtgtgcaggtgtgtctgcatgtatgtccatgtgtggacattcacatatctgtgaatgtcaatgtgtgtgtcagtgcacatctgtgtgtgcaagcctttgtgttcaagtatgtgtgtctgtggtctgtttctgtgtgcacatatctgtgtgtatgtgtgtgtatttatgtgcagggacagatttctgtgttgtgaatgctcaggagggtagcacaaaccagtgaccttgagaaagttacttaacctctttgtacctcattttccttagctataaattggagatgtgtttgctttgaagattaaatacattaataaatatatagtgcttagaacagagcctggcacgtgctaggaggggtggctattaacactattgatctatataaagatggacagatcagcccagagagaagagctcatatcctgttggcagctgccagtggctcccctcagccttagtactaggatggtgcagtaaacaacctgtgcaactgtacacaacagccctgttagccaccctctctgtggaaaaggagataattgagaaggaaggagaattgtggatagaaagaatcaacgttataaagatgtcattctcttaaacttttcttcacctcaaacacacacacatacacacacacacacacacacacatacacatacgaaggaatttttttaagtaggcaaagtgattctacagttcacatcaaaacaacaaccatgaaagaatagccaaacaaattctgaaaaagtatagcaaacagaggaaactagcatagacatttaactacattacaaagctgcaataatgaaaacagtgccttcttgtaaaatagactgatgaagaaatagtccgggagtctagaaatagacccaaatacatacgaggaaatttaatgtatgatgaaagtagaatttcaaatcagtgggtaatacaccaattagtcaataaatggttttgaaacagctagggaaccatttggggataaaaaaataaagatgaatctctttctggcacttttacctcaaaataaatgctggatggatcaatgttttaaacatgaaaaatgaaattctaaaagacctagaaaaaaaatcagagatttaaaaatatactgtcttggcaaagcaatgtactcgccaagtactttctaagtactatgcaagctccaaaaggtcataaaacagattgataccttcaactacacagaaattctgcctggaaaaaaaaaaaccctcataaacaaaaagaagtgacaaatgacaaactggggaaagatatttgcaactgttatcacgggcaaagagctaattttcctgatatagaaatgttcccacaaatcagtaagaaaaagattaacaaaccaatagaaaaatgggcaaaggatatgaagttcgcagaagagaattacaaatgcccctggaactcacacaaagatgctcagcctcatgataagaaaaaggaaaactaaaattcaataagataccattttttcccttatcacactggccaagatgtaaaagtgtgatattctgggctggtgaatttgtagagcaacaggcaccctcgcagacagctttgcgggactgtagcttggtacgccctctacgagagcaatttggcaatgctatcaaagctaaaaatgcacacatcctccaattcgccaactcttcaaggaattcaccctccacagactcacttgtgcatgtgtgaaatgacagtacttcagagccgctcagcttataacagcaaaagcttggaaatggcctgaatgcctatcaagagggcactgcttaaagaaacgattgtccctccaaacaacagaattctgtgcagcagacggcgcctgagcgatctttgagaactactggtaagtgacaaaaacaagaatagggtggataagctcaggcatggaatagggtggataatctgctactgtttacgtagaagcttttcttcttcaagtataaaaatcaatttgcttgtattggcacaggctttttctagtggctccatgaaaaatggatcccagtgacacttgagggaggtctgggtgcccggggacttgggttgggggactagcttttcactctatacctttgtgtaacattgatattgtggaccacaggtatgaattacttatctatgatcagatatatgtatacatgtgcatacgtgtatgtgagtgtgcatggtaagctgttcacagggtgatcccattgatgacagggaagaggacagaccctctgtgtgtcatttaggcatgtcacgtggctcggaggtcccggaccagcagagcctgagctgcttaaatgaagagcggccttcagaggccagcaagaggcctcagcccggggcttccttgtaatttcccataacaggtcaggggatcgctgactgccatcttcccttgatattcgcactaaatacccccattgtcctccctaggctccaggctaaatggccccatacagaagccaatctcaacttcaacttttccccttctctgcaaaataatgtcatctttctctggagtccccaggctgtgtccatctcactgttcaggggatttgacttcccagccagcccagccctgggaaccgcacctcctgtggagccattctgctgggaatgggtcggtgggtggaggaagggggtgatggcttctgccagccacctaattggccaaatgatgtccatctgccctccagaataagctgcagggagtaccaagcctggacaaactcccttcccagctctgaaacatgcagaaacctctctctttttgcggcttcttctcaggcatagaataagggctcagtcatcacgagcttccctggaatgcttggaaacagggtgggagctgggatttctagactcgcaaacttttctcccaccatctcctagtcttggccccaccaccgtgtcctggactgattaccacggcctcttaatgggtgccaggggtggaaacctgtgctccttacccctggtggaccacacacctgagcaggatggacccggggtcagagggagcaggggctcagggtgggctgctctcaccaaacctcacttctctccaaacttctagtcttgctgctgcctttattccatactaaccatggaactttctatccatgaagcactttacattcatcatcttagttaagaggcctgagttcatctcaaggaaaccactatcattttccccattttaataggagaaaaccaacgctcagaaaggttctgtaactggactctgccacatagacataagccaagatctggcaggttccagagctctggatctttctattattagcataagacttcccaaagctgtctcacccttcataccccaacctgtagcaccaggggtggtgagagggacgggggacattcaaggaggttggtggcctctctcagggaactggttttgactccacaagcaaaggtcacgcagcattcatactccagcctgcgatgtcacagccccagagccagattctgggatgagggcgaaacaggcggcccagctgggaatgagtcctgcgaattagctagaaggataaggaggcagaatatcccagaagagactggtccgcccagggggtgagggtttcaggtggatgagctaagaaagggcagggagagaagcctggaaatggaggtcaaatagcacagaagatgaacgcatgcaggcgtgggggccaagtaaaatgaagcagaggccagagccttaggggcttcttgggaagaaggggctaagctgggggaccccaccctgcagccctgctcccgaggaaccaccttttcaagaatctggcttgaagatcccagtgggagaagataaattgggtttacatcccatttccatgctaactagagtttgaccttatgcaaattcacctcctgggccttacctgtctcatcagtgaaacagatggaaactcctgccccagagcctgcaggaggatcaaatgagctaatgtgggtgaggttggagccacagtgcttgaagcctcagaggtgcccctttctgtcacacaaaccattgggggtgaccacataggaaggagatggggaaagaggggcaggggctgttatgatcattccacctgtttcccgcttctcagaaccattcccctaagaagcccgcagtctcttgaagttcttacgtctgaggcttccaaattcagccccctcaatgccattctaagctggctcaaaaattgggtcttgcctgggatggctcataaggttttgagcagggtcaggactggtagagacagctggagcctggggaggggttgcaaacgcctgcgtggattggtcccacaacattggtcaaacccaggtgggagatggtactggtcagggtgccgagggcccaggaggaggctgctgtggccctgttcggcccctgcccttcagaagaaatgtctgcacgtcatacactagctaggtggggcagggactctctagctgcctgataaaggctgcagggcctggggctcctggcgagtcccttccctctcccagccccatgcctggcaaggcctcttgctcctgcctcaccagccagggccccagagcaccctagccccctccccttggattccctcctcctcccttctcccacaaatgagatgctaatttatgcccctccctgtatcctagcagatgcctggcccagctctggccccggtgctgcctgcatgccaagcgcttcattagccgggaaagaagactcttgccctccttcgtctaatcctcgccagtgaccttcaggaaccaggcaccttctgacgttgggagcctgggatggtgcaatcatcaattacgccgtggcctccgcagctgttcctgaatggatttcttgctcagagaagcgtgtttgaaaagcatctaatggaacggatcatcaatttgtttgaatacacatctaatctgattaggggggcactggccaccagggcagctagtgcaactgagccttgacatggccccagggaatcataagtggggtggcggggccagtctagggaaggagggctgtgtgccctgggcctgccaccgagccctccttgagctcagcccatggtacgtccagccaaaaaagtcacagagaaaagcagaacacatcacacagatgccaggagagctgggcccaagactcctgtttttctatagccctggcactgggcacagagcctgagacaaagaagatgcttgggaaatatgtggcaaatgaatgacagtaaggcccaacatggaagccaagggatgtttaataaagtcatctgtgggacaagactaggtgatgcctgtattgggttgaatatgtctcccccaaattcatgtccttcccaaaacctcagaatgtgacctgatttggaaatcgagtctttggagatgtagtttgttaagatgaggtcacgctggagtaggatgggccttccgtgactggtgtcttggtaggaggagaagaaacacagggaaagagacacacaaggagaagacaagagccaagtaaagacagaggcagggactgaagcgacgcatctaccagccagggaatgccaaggactgctgggagccaccaggcaggcctaggacgggggcaggacggagtctcccgttgagcctgcagaaggagcatgcccctgtcaccctgatttcagacttctggcctccagaactgtgagagaacagatttctgctgtttaaagccacccagcttatagtgctttgtcatggcagcccaggaaactcatgcaatgcctacaggaagctttgtccgtcattccacagaaggcagcatggcagagaaccagaaggaagtccgagccctgcctcgctggatgtagctggtccttcccagacacatcacgtgcgccatgccactctcttccctggggagccctttcttaccttctttaccaggaaaatgttggttttcaatccatgttagttcctgtccagcaccccttcaaagctcaaatgccatgccctctgtaactcttctccagatgtcctcctcagactcctgagatcgcctccctcccagcatgcttggtgattcccatgctacatcccccactgctgggcacactggggctccctcatcttcctagccccagagcctggcaacagcctggcctgcagaagagcccagatccatgagaaagtgggcaagcaaacttgctgtggaccagcgggtccctcccttcttgggagtggaccagaatggagatcacaaagttcccttccagccctgacattataagagccgagtagccctctgggggatgaccttactgggccctgtaatgggaccacctgggttcaaacccagtggactctgccactcacaggctgtgtttccctgggcatcattctgtaactctgctgcacctctcctgaaaaatagggatagcagtgcctacctcgttggcctatggaaaggggtaagtgcttcaaccagtgcctggcacagagaaagagcccttggaaagaaggctgttattattcctcatcttggcttggtgcagcctctgcaagcccttctcatagccggggcctcctgtttgaaccacacaggtaaacagggccaaagcacctccaaccttgcatggaaaaaagacggttctcatttccaataggtttattttgcagttaacagaggggaagggagctctttcttacatttcccttggagggttcagagattaaacttataccatcgattagaatgttttggcctaacggtgctagtatcattttagtgtattcagattcatttgagctataaaagtggcgataataaaatgttcactaagtcctggaattcctcccaagaagcccgatggtgttacatggaccacagtcctcttcccctcagtggccccaaggcaggacagcatgcttggagcaattctccagttttacagctgagacttgagaccccctagaaattgatcaatggcctggccggcctgggtggcttcatgagactcagctctgcctcacctctgtcacccttctcacaggtgactttgtccaccatgcaggtaccactcttctgcccatcccctaagcctggggactctggtgacaaagagacactgtcttcctacaggtctgcaggagcccagagcgaggactcataggcccagggatgcgtccaagaacccacagcctgggggtctccagtgtctacctccttggtcagcgatggtgccaccagatgcagggcacggaaggctgtgccgtgaggaaggaccagcaccccagagctctggctggcatgcttcccaggggcagcccctgttcctcctcttgcccacccttggagacgggccatcacctaagaggagggagagatggaagctgggggaagatgggagctaggggcagtggctctgacttaacaccagcattggtttcccaatattgaataaagagggctgagctggacagcaggtgtccttaggggcttgacctcaccacccccagacggggcctgtctgcccaatttcaggggcttctcctcaatttcctggcttcagggcgaggctgctcagcccagggacaagaaggaaagatgggtatttgttaaaggcctactccacactgagcagcgcatgtttacccatttaatcctcccagcctccttaggggagtgctatgaggacttctcttttatttctctcatctgaagctcagatgagagaggtacccagtcacatgtgtgtcagtggcagagctgggttttgaacccatagccgcctgcctccatgcaaggcctctgacctcccctctgtccaggctgcgtttggagcccaggaacagattccaaggctgggccccgcagggaggaaaaaacaaagcacgagtcgctctctgcacggaggctgagagatggagccaccgctgaggaagaacacacattcatcaggctggtgaccccggtgtaccagcgctttgtggcgtgtaacaaagactgccgagcagaaaattggagttcaatttgccgtccatcctgcacgcagtgctcagcccattctagtccctggcaggcacctctgtgctttatcataaataataacaccacgcggctctatggccctttccgcagttacagtccccgagcaatttacaagccagattatacacagaagcctgcacatgcctgccggccagcacacaccacacacacgcggcctcctccccagtcactcctagggcccacggccatcctggtgtcacccatctggggctgcacccaatctggagggaagcaggccgttgtgcacccctggacactgggctctgctcctgccctggtcaccttctttatcccttttactggctctcatggttggcagagaacccacgaggtctggtggcccactgccccttgctggaccaaggtcaaggccacttcccctctctttctttccgttttagaaggagcttctggacctcctcccctccaatcagcagtggccctttgtctctaccacagggagtcccgtctctcctcagaacttattgggagtagtgggggggtgcaaaagcagcaacagggacccacaagttcaaccgctcgcttcacagacgagacccctggggcccagagaggtgcagcagcttccctgaggactctgcatcagctgctgagctgagaccaaagcccaggaccaccggcacccagtccactacacagcggagccccaaggagggaggtaaacaaaggtctagggcagactgggctgctccctctgagcatctagaaacttccccagaagcagaagcttcaggcagggcctggaggggctccagcagcagctccttccccctcttgccatcaaactaaataagaggtcaactattgtatgatgccatttatatgagatatccagagtaggtagatccatagagatggggctcagattggtgactggcaggtggttgggagagaggggaatggggagtgactgtgagtgggtacaggcttccttctggggtgatgaaagtattctggaactcagtggtggttgtacatcattgtgaatgtactaagtgccactgaattgctcacttgaaaatgattttttttttttttttttttttgagaccgggtctcgctctgctgcccaggcgggagtgtggtggtgcaatcatagctcactgcagccttgaactcccaggctcaagtgatcctccactttagcctctcgagtacctgggaccacaggcgcgtgccaccatgcttggctaatattttgtatttttagtagagatgaggttttgacacgttgcccaggctgatctcgaactcttggactcaagcaatgtacccacctcggcctcccaaagtgctaggattaaggcatgagtcagtcttaaaatggctaattttatgtcatgcaaatcttatccccatcaaaaaaataaaaaaaaataaaaaacatacaatgggtgccaggtgtcgtgtggcctcctacttcccctcctctccctgccagccccatgcagttcttgggaagaagactaaaaagcaactccaggtgctgtgctccttcctgtgctaatccatcatctggctcctgccttcctgcctcccgcccttgccctgcctgtactcaggagcttctcccatgtgtgggctcaggcgctgggtctcctctgggttctggagggtggggatgcatttccaatcactctcaagtttgcaggccatttgcaatgacagaaggccttggttttgctagaggatgggagttgggggcgggggtgagccccaactccacatttacagactgctcgagacagagtcaacacctgttttctgagccacagtctcctggcgcgtaccaggaagtcctgtgacacctcccttgctgggttttgttaggattcaatgccatagaactggagaaaaacccggggacactttgcctggctgagggcttggcacacagagatcataggaaccaggcaggtgccaggcctcgtgctggtgcgtcaagtgtattttcttatttgcaccacacagcaatgctgtggagtcggaactattcacggcctcactttacagaggagggcactgaggcttggagagttgagtgactcccaagattacataatggaagtggaatggaaggtgttgcaggtccacattaaaggtttgtttttttgctccttccacaaggccggtgtcatcaaagaccaacccagagtgtgcaactctgagcgccccggagagagaaggcagggctttgctttggcggagctccagggtgggcggatgggctgccccaaaggcagggaggagagatgctgtgctgacccctgccccaggctgcagccacctctgctgcccacctcatcctggcctggctgctcatgtgcctggtggcaggtggcattcccagacaacagcctggcccacctgcttggggaagcagaggagtctgctgaaggggggcagttggtggtggggagggccaggcggcaggcccccacattccaggggactgtattcattatccttgcctgggaaccagctggggttctctgccgtctctgctcttctgctttgaaaacacatagcccatctgtggtagaggaaaggtggctgaaccaacatctgcaggagaaggtgatggtatgtggactctgctaccgcctcctgatggttatccatccagggaggtcagcagctccccttgcttctctcgctcaatgtcatgtcctcagatttaatcagcaccaccccacccacccccgctcctctctggaggaacctggggccagcagctgataccagggaagaggagagagacagaaacacaaggaaattcatactaatgagagagcagactgggctcaccctgagcatctccatggtgccaaggttcacattcaaatggagtttgtgtctctgtctctggtccccagctcctcttgcgggtgggatgaggcaggaagaggcagctgaggctggacatcagggaaagccctgggctggaggccaggccctgtcccggctgtggctgccacagcttcttagcttctctagtgggaagcatctgtggaactcatctagcccaacctctcttgctggcagatgggaaaaccgacgcagaagagaccaagggagaattggagctagattttgataccaagtcactctgtctcacttgatagctcttagcctcattttttccacctgttaaaatgggcatgaaggtttcacagtcacctgctgtccccttccaagtctaggctctgcaattgggcctttttgaggatgtctggttatgccaggagagcctctcttccccgagagagaccaagcttcccctcttgatgaggggagggctggtgctgtggaatgctcttcatggacttctgctataccccatattaagggctgaattgcactgaagtcctaaccctggatacccgtggttgtgatcttatttattatagaagtggtctttgcagatgtaatcaagttaagatgaggtcatgagaggggactctaatcccacatgactgatgagaaacacgcaaggagaagatggccacgtgaagacaggtgaagatgggaacaatgtagctgccggcatgggaacgccagaatcgctagcagccccagaaaccagaagaggcaaggatgggacttcccttacagactgcagagggagcgtggccttgctgggcactttgatttcagcctactggcctccagaactgcgcgacaagaaatttctgttgtttgcagccacccagttgaggtactttcttatagcagcaaatggaaccaccccctcacctgcaccccccaaataacaggccagcactgcgcagagcccctttctctatgcaggtttcccagatgctgccccagcagaagcgagccccctcttgtatgctcacatgtccatcacgacagccctaaacttctgagagccttactggacctggtacatcttggtcatttctgtaccttcagtccttaatctggtgtcttccacagaataggacctcagtggacattgagcaagggaatgaatgaaagggattttctcatttccaggctctgtgatcatcccttacctgcccctgcatccctctgacctatcgcttctcattcctactggctacttctccatgcttgggcctccatttgccctccctggccccagaatcatgtcatgacagctgctctgcagttgggcctgagctcagctaatggtgactgacgacattctgtgtagcagggaccctcgggcagcaggattggcatgttggcaggaggcacagtgtgattgatagcctacgtgttgataggtcctttccaaccccttccccagaggctggagctttctggcaaggagaccaacatggcccccgcccgccccggccattcacccttctttttctgttgcctcccctctttcccagaactaaaattcctgcccttcccctggtgggctggggatgaaggtggatgggatgtttagtattcttgggctcaggcagagaatgaggggctccttgtattcccctttttcctgccaggacacccacatccagacagagtgatgtgagagtcacacacctactgtgccctcttccctctagcatgactggagcagggggcctccttcccaggacccctgtctgcagtcatgagggccaggcacctctgtgctctctgtgtgtgatccctgagcccaggtagcacgactgtcccattgcatagatgagaacactgatgctcaaagacatgaagtgacttcacccaggttacacacatggtcagtgtagaccctgggattggaatgccaagctgtctatctccaaagcccacgctccttccactacaatgcatgaagcggtttggaaaggcaacagagccatcgctgggtgcttcctcctcaatcatgcagacgtttcaggcaggagcaagggttccatctcgcctctgcgcacatcattcccatggacttgggctgcctgggaaaggccaaaccatcacatgcatcccatgggtgaggccgtggatggctgtccaagactcaccttcctaggcctgtgtggccctgggcagccaggctacttctttgggcctcattccctttagggcatgatgaggctcgtctctgcccacccctccccagggcaccaaggagtaagcgagagctggcctttgaggcaagaagcccggagaaccatgggtcttgtccccagctgtgtgagatccaagacaggctctccatggggaactgacacagggagagggagggccccagaagcagccctcgagggggtgaacgccaggagggtcctaggagatctttgctcactctagccaggccaggggcacagcaggcaggagggcaggccggtagctagggtttggcaatggacaaagccagcaagggaaagggagagtttacaggaaggcgacaagttaccggaaaggacaataaattaatataatagggtgcttggctggtgacagggaataaaacacgtggtccaaaaaagccccatgtgagattgtcaataggatgaatgagaagggaagagggaaatgggggaaagaatgggaaccggaggctcactgagcagcctgtgggaggcggcgaggtggctctcctcactgcaccaccacctcctctgcctcttctcagatcaatgctggcatcagaaccttctctccaaacggccccgcaggatcccatccctatcctagaagtaattccctcccttttgcactggctcccccatccctgcctacccaagaaggctcccccctaccttgccccctagatttcggtgcccttgactcccatcccatgcaaatgccctcagctcttagccataatgcagaatatgcatttcaaccattcattctttcactcaaaggtcaattcattcattcagcaaatgctttttgagcacgtactacgtgccacaaaatgtcagagtgagcaagaaggaaatctctgccttaaggagctcccaggctcacaggggagatggatgagccacttggcagtgggacaagtgcgcgacagagtgaagcccttgatacatctggctgctgcggaggcacagcttacaggaccgtaatggccctggggaaggtgtctccaatgagcatcctaaatggcacaagccaggtggggcagtcgggaacactcacaggcagacggtgtcatttgtgaaaagccaggatgcgtgcaaggaacggtggcttctgggaactttagctatttcagcatgatggggctggagggtgcagggttgggggctgcaaggttgggggagatgtggccggccagcacaggggccgcaagagcaggcctgggtgagatgaactctgattcaagccctggctttgccaattaggacctgcatgaccttgggccagtcaggtaacttctttgatctggttcctctttgaggagaaagaagggggtgggaataatgtattaatatctgctttggaggagaaaatgcagacgtatctctcagcttggcttctgggctttcaatgaatcaatgaatgaatgaatggtgacgatcagagtcctaggcttataaattatgcctaggtgcttggatgtcatctgtgggtggtggcgaggcactggagattttgagcgtgtgtgtgtgtacataggtgtgtgtgtgcatgtgtatgtgtgcatatgtgtgtgtttgcatatgtgtgtgtttgtgtgcatatgtgtgtatttgtgtcctgagggcttgtttgggtggcaggatcagcccaaggccccacaaacccacttatgtctccatctccagcctttcttagaggacagttacgtgcagtgtgaggaaagatgaagctgaggatggtcctgaataatctttgatgagcatgcaataaaggaccctcaattcctcaacacagaggatctcaaagtcatgacttgtcttgttgacctttcctgatcagtgaacaccagttataggccctggcaacacaaagaggtgtagacatggccctgcctggaggccttcacaagctggcctgagagataggattcacactgtgagggatgactaacggtgtgaggcatcaccgggcatgggctcactgcggatacaggagctaggcggatgggcacttggggaagagtggggccactgaggattggcggggcagtcaggggagctccagggaggaaggggaccctgtgagtcatttgttcacggatcaatccaatggcattggactgtcactctgcacagggggaggggagcaggatgatgcagtcttggagctcatggagcttagcatctaccaagaaatgcaacgtgaagcagggactgcaagagtgggggaaggggtgtggatggtgtgcagatgacagtgggaatgcataatgcaaaggagaaacctctcaaaaaggtcacccttatggcagacagaagccaggcagagggaacagcagggtagggagtttggagggaaagacagcctggcccattcacatctggctcagaactggagggggactcctatggttggagtcctaatggcaagaagaggaaaggaagagggaacaggagaagaatgcacagggcctgcactggcctcattagtgagccacatccaggctccagggctctatcctaatgccgataagaaggccctgaagtgacattgccagcctggcagttttctgcacccctcctggcagtgcagaggagcgtggatggaaggaggtaggtgtgccggctgagagtctagtttggaggctgctgctgtaagactccagggcagagacgatctcccagggagaaatacctcctttggtggacttcgttttcttttccatcctatgtggaaactgttccctgtccagaagaaaaatgatgctgaggggagaggaggtggctttttcgctaggattctggtgctgacgatgggggtggtgagaagaatggggattgtggagctgttttggaggtggaaccaagaagacctgtgttagattggagggcgggggttgtctgagggagagggaagcgtcagcagtgagggcgaggtgaccgagatggaaacaccgcagctggtttggagagaagatgccaggtccagttttgggcatgttgtggccagctggttatccaggtggaacgttcaggtgctagccagtcctggaccccagaggaggggtgtggagccatcagttagcaaatataggggaactggagctgcacacctttcaaaattcccagagagacaggggagagtgaagaggtagggagcccggcagtctttgctgagtacatctccaaagtctccccggcttcttttcccatcctgggttcctcagccccattcctagtctgtgcaggtgcagtgaaagaagtaacacgtatgaagagcttgcaatgtgccaggttgtcccaggcgatgcaccaagtccacatgacaatcctccaaggtcactaccacttctctaatagatggggaagcagcgatgcagtgaggctgaggatctgcccaaggtcacttgggagcgagcagtggagggattcacacttggggccggtcaagtccttggctcctgctctcatcccaaggcgacctactgcctcactaagccccaggtgaacagcgagggctgcttgctctctgttctccactgtgatcccctaagccaggggctgaggccttccactcctccatctctctcctgctctctgttgactctttgacactgcagggtcaccatccagtacagcagatcaatctctctacggctcatctgctcccactgcatttatcccctgatggtcgaagcttttatttcccggtgagaggagcgtcccctggccatccccaggcacagataacttacggaccaatcaatacagccattaccctttggaccatggcaccgacacaggtgcaaggagccaggggagcaggcctcgcccctgcacctctgccatccttgaggtccctgagctctgcccagcttctgcagctccttctggtggctctcacaaggtcttctcattgttgccccctcttctgtctttcttgagtcctcttacaccattttgtctacctgagccttctgtaaatacctcctttaggggcttagctttcttttctgtcatatggggaaactatttccttgtccagaagaaagatgattctgggaagagaggaggtggtttcgtctgtaatgagcgaaaagcatgcatgagtgggaaccggggagtcctacagtcagtaccgaggttggggacagctgagggaggaccaggctggaaaacagagatttcactcgggtctgcctccaccactggaggctgggagactttggaaaggccaccttagccctctgtgcctcaattttctcatctgaaatggagctagcaccgtcaatatgaagagtggaatgattattaaacaaggcaggctaggattattaacaaggctgccttgttaataaaccataggcaaattaggtcagggcactgggtggagtagcgttccccaaaattcatttccacttggaacctcagaatgggaccttaatttggaaatagagaccttgcaggtgtaattcttcctgttaagatgaggccatactggatcagaatgagccttgaatccaatgactagtgcccttacaagaagaccaggtgaagccacagagacacacggggaagatgaccatgggaagacaaaggcagagattgcagcaatatatccacaagtcaaagagcaccaagggttgccggcaaacaccaaaagctagagacaggcatggaacaggtcctccctcagcacctccagaaggaacccgctgggctgacacctttactttggatttctgtgccccaaaactctgagatgatatatttttgttacttgagccacccagtttgtggtatttgttatggcagccacaggaaacacatagagttgttaacacggtagtgggagagatgtccttaatgcaggacccattcctgctgcccagtggggttaagtgaaattctctatggacatgggcaaggtggaaggaagggggcaaaactacccttccacatcttgcattccagtcgaacccatacctgaagaatgggacagctagcttctttatgctttgctctagcttcttgtctcctctctggcaactgtttatgacagtcccctcctgcattagtccattttcacactgctataaagatactgcctgagactgggtaatttataaagtgaagaggtttaattgactcacagttctgcatggctggggaggccgagggaaacttacaatcatggcagaaggcgaaggggaagcaaggcacgtcttacatggtagcaggagagagagagagtgcaggggaaactaccaaacacttataaaatcatccatcagctctcatgagaactccctcactatcatgagaacagcatgggggaaaccgtccccatgatccaatcacctcccacaaagtccctccctcgacacctggggattacaatttgagatgagatttcagtggagacacagagccaaaccatatcacctccctaggatccacagaacaccctatatacaaggaccctatatacaatggtaggggctgtaagcccctcgcaggggtgtagcttgtactgctggttgggtgggagcaatgatgtccaaatggcactaccacatgcatccctttcacctggtcttacagtctcaattacccctggcattctccaaccttctccccatgatggccttaacaaatgtcacggcaccatgttaattttcagaagggaatcattttgagcatctattagtgagaacaaccatgccccttgtggccccagtagagcatctagctacaaacccataggaaaaggggaccccgtctgtgttctctgacaaggggcataagactctccctaatcaccagccctagggaggcttgagggatctctctggggtgtctgaatatgccagtcactcacttcctgactctgtaaccctggtttccaccaccttctcctagtcctcctccttttcccgcctttccttccctgccttcctcctgtggttctgaaatgttgatgtttccagctttctgctccgatcttccttgttcccaccctcatcccttggaaagtacagctgcttttcttttctgcttttagctatggcctggatgtgaatgcctcccagatctttaaccctgatttcttgcctgaataagtcaactgtattttgatgacctccaacatgctcaaaagtttaaaatatccacagctgagctctggtctctgcaagcttgtagaggtaccgtaattttctaatatacttagcggtcttgtttgtacagtcatccaatccagaaataacagtgccatccttggattcttctctgcccttcccccacctctgaccacccactcacccccaggccctgtgagcccagctgcctgttccagctctggtgcataacacggcgtctggtccaccgttggcattcaataaatattttctgaactaacaaattagtcctgctgggttcacctgctaagtattccttaaactggcaagccacccctgccccatctctgatctagattccatctgccaggcccttatcgcctcccagccgccagtcattagcccaatctacttaattaaaggtatttctaaccatgtgcttcctgttcaaattccttcaatggcactccattgcatacaggataaaatactcctcaatggggaacacatagctctttttgtcactgaaccagagacatggtggaaattctggaaatactgactccatggaagggcttaacaacttgtggtttcctcacaaaccacacaccctttcccccaggccttcactcctgtcaatccactgcctgatgcctgcggcctgtgcccacccaccagcttctcctggacactgccagtctagccctagagtggctgaggtgcctgtacctatcggcgccttctaatctccatcgtggtgcattacaatgatctctatgcattcgtctctctctagagaccagatgttctcaagggggggtcattctgtactcctgcccccagctcccgggggacccctggcgatgtccggagatgtttttggtcgtcacaactggagggagggggatgttattagtgtctagtgggtagaggccaggctaaatgtcctacaatggacaggacagcccccccacccacccccaaccaagaacgatccagcacggaatgtcaactgtgctgaggctgagaaactctgggctagacaggagcaagttccctgtctgtccattcccacctccagggccttgccttgaccctgccacgcagtaggcccgcatcgtgtgtctgctgagtgaacatccccacactccaccccaggcctagagtgaaattggatcacttcttctgcaaacaggaggcctgggctgcgaagaaaaggtgccagctgcctcccaggccccagagtcaggtggcaggggaggaggctaaggagagtactgtccttcagagagagccacttcctccaggagccagggcggatgcaaccaatttagctaacaagttgtcagggctgtgatgacgttgccagacaatgaaatcgcccttcttatcaacatggactgccagactgatgagacaaacaagcctgttaattaggcctgtaatggcagctgcaaagggtacaacatttccaaggaaacgggggggctggaggctctctcttgtcccaccagaggtggggcatgcagcggggcttagttgcatcccagacaggaaggaaggctcatctcaccgtggccatggccccacgaggcctgggcctgaaagggtggttagtgtgtctgtcttcagtcacaggcttcccaggggcagggcacagcgcagttaactctattgtggccctcggcacagcggtttacccagacaggcacttaataaaggcatttaataaagatgagtataaacatcaaagggcccctctcccctttcaggatccatctttctctctcttcctctccagccgttccttggatgcccatcttgctcctgcctttctcagagtctctctgtccagccctctgtgtaaccctcatgcccctacgggacgcaggcagtgcagcgctccatcaagcaaggcccagagaggtcccctcatcggtatccccttcggctggtatgtgttggcgggatgtgccagtcactgcctcctgaccccattcctcagcatccctggtcccgcagccaaggacacaggtgggcgtgcagccaggccacactctggggccccggggccgactggcacggtggcttggcctggattcagaggcaggctgccgagcctggaggaatgacatcctcagagctggcgggcacatcccctggcagtctgtctggtcattgggcagtggccagccacacaggtttgtgtcccagcaagagtgcaaacagtctgggacaccccacgtccctggacacaggccctgaggccctctaggggaaacgcctagctccagatcatcactactgcccaccatcacttccctggcacagggaggtcctctccacctccaagactcaggttccaaaacgctctgtgctgccacttggaccacactcagctacagatgggccagcaaggctcccagaaagggccctcccccagccccccacccccccacccccccagacaaattggggaacccacttgggcatcaccagcacctttcttgcagctctctctgtcttcgccaggttccctgtcaccagcaggccccttcagcctgccctccagctccttcaaggaagtgtctctttgagactctgcccccaaagaagggtcattattgctaatgccttttctcccccatctgttgtgattgtttacactccacttgctaattagagactaattagctggtgctgaaattcatcactttccaaacacaatgcggcagcaggaaaagcacagtgatgcggcaacatctgcacctccgcttgcagccaagacgccattctgctccgcctgctccctgctcctcctcctcctcctccttccccgcctcctcccctcctcttcctcctcctccttcccactctccttccaataagcccctagaaggcctggggatgtctgcacttttattcagcaaccacgggacaatgcagtgcaatggctggtaggagagactcagtacatccttgctgaaggaatgaatgcatgtgtaatgaacgaatgaggatcaaaaagcagatgcaagagcgggtccgctgctgggggaaggggagtggcattaaatagctggcggcagggagacacagctgtccatgattctgaggaaggtggcactgggcaaggcagggaccaggaaaaaagcattcctgggacagaggcagtgctaaagagacgattgccgacagatgcctgacctctgagaggcctgggggctatgtgggggaaggttcagggacagtgtgggggctgggagaaaagacagacaggagggaggaggaaggagaagtaaagtcacaaaagggagggatgggaagatgcacagaggcagagcgcgagaccagcaaggcagcagggaaggccggtggaggggaggcagaggtcttggagtgttggtgctggctggctctggtgaggaggtgtgactgcatcctagaggtctctgcagcctgggattgaaaccatccatttgcctgacagctgagagtggagtaggcctaggccctgacctttcttcctctcatctaggggaaagcggcttctattacctaaactccccttcttctcagtaggctgggggcagcgggccgggctccctggactcctttgcatcttctaggcctccttgtggggatactggatactctgcgatcggccgatcagcccgctactgggtctaaggaacccaggaggagggaggcagcctgaaactccaaggggcaggtggggtctctagcccaggccttggtgcacagtttgagaaggagcccccaggacatcctggaatctggaggagaaagagtggaacctcttccctgcccatctcatagtgacatcccagaagacaccgccaatcccctatagccctgaccaggaaaccaaaggtggcctcgacgccaagcctcatccatgtgtgaggacagcagggggctgccctctcttgtgaataggctgcgtacatttcccatcccaccttccttgagagcaggactatgggagtcacagccactcaggttgcagtccccactctgccactttgtgctgtgtggcttagaaggcgctgcataacttctctgagctcatctgtcaaatggggatctccaccctccctcctggtgtcgctgacaggaaaaatgacatgatgccttcatcttaagcatggtgcctggtactggtgtgcatctgctgggtgaatggcggggtggggcattctgcagtccggctgcctcctggggaacatagactgtttccttcttcgcctgtcttgcttcacatgcaacacgtgtgtgcttatatgtgtgctggtgaacacttaacatcctgttccccaggaaatataaaaaagccctgattgcccaccattgccaatttccctggtgtaaatgctctagctgtggctgatttgaagctatcagtgggacatcatgggctacggattgggaagagaggcacacagtgagcaccggctctggcacaccattgcctgccatcaccaaagtagggtgtggagcagaaatctctctatccatggatgtggctggcagggggctgattaggaacctgggtgaggtcagttgagttcctgccacacaaagctgcttggaccagagtgatcattgttcatgtggggagaaggcagggggcggctgggggtgatgcatgccctccataaggaccacgcccacccaccaagcacatcctttcttcctaattcctctgtttcctccacgcccactctgacacttttccttttctgatttcacacatcttagaaactcttagctggttccacgtgctttgcctacactagcaagcaaatcccaatttccccgccctgcagttcatggacgagaccacacctgggctatatcagcatcacccagagggcttgttagaccacagaggtgcagggccccactcacagcctttaatatagcaggtctgggtgggcctgagatttgcatttctagcaagttctcaggtgatgctgctgccctagaggccatcctttaagaacccctggacctggatcagcaagcaggtcactgggatccagacagctgcaggctgtgctgttgtggaaggtttggtgttgggagttcagaggctcttttccagccccagaaaagcctacgacttacttccttgttggcattccaccccaacccctctccagcctccttccgaggcttccgctgacccctgcacctctctgccatctacaccctccaaacccccaggctgggccacctgggcacctcccacctctctttgtaccagggctaggtgtgccgaagccttttcaggcaaggggagagctgaccaggggggccacacagagacagctggggctgctggctattgtcctagaggcagcagaacacgctgcccccacgccagtgcgggggtcgcaaaatcactcgttgctttccttctccaaggttccatgtgcaagcaatgcacaactagtttctgcctcacatcccctggccatgctgggggcaggtgacaagggtccactgggggcctctctgaagttggggggctataaaagtggttccagagggtgaaggagactgtagccccgcctccttccctactccgccttcctgctgatagtctaatctcggcctcctgagtaactaatccccctaatgggatcaacatctctgtccctgcactttacttacataatgggtcagggaggccttcctctaaccaggttggaggaccgctgggtggaggggcaggagtgagatctggggtgcaggagcattagctcaccctgaggctttggggactgtgaggatggatcgtagcatggtgctggttggaggtggcggctcaggatcacgacgcatgtgcgtgcgtgcgtgtgcgggcgcgcatcatgtgtgactgggcgctcagttaatactcagccgcagatattaatccctttctatgcaaagagacgatggattgtgagccctgagaaatcaaagttgaaactcagccaacctcctgccctgctcgccttgcccctgccaaatggccgcgtctgttaacgagggagataaacggagaggccatcaaagcagatttccaatctgccgatttcgctttggggccttcagaactcggtggctcacctcccccttctgccccgactccagcctcctctgccttcgattcccactttgttccccagcccccatgcttttatctcccaaagttggatctattgacccagctcataagggctcctttcatcgggctccagagctgctgatggagaggcaggcagagggtggaagggatggagaagtgggttctgcagcctggagggtgggggctggggagagggggaggtttggggggatgaagaggttgccaaagcagaccgaagcctgtgtgggtggggacgtgcccagcctgggatgtaggaggaggcagaaaccaactcagggagggagaattgcctgtaagcagggggaaggaaggcccttctcaatgtgccaatctgatggtgcatctcccggctgcatagactcagattccccacttcaaattcactttgctcttctattgtcttgccaggaagcagcctgaacccattcttatgagtgaaaataaaaaatgacaccgcgggaaaaataacaaaacagtttctccattcacaaaccccccaaaggctgaaagaaaagaggatgaagagggtggaggggtcacctgtgcactgacctgacctggaacacagtacccactgatcccttcaaggatgggtggttttatttccattctgcagatggtagagtgtggataggtaacttacagctggtacctgggagacagacttctgactcccgggaacggcggtgttcactgcacttggcctggctggaaaggctcagtgaatatttgtagtaatagcacagactcagaagccagacagactgacctccagtaggtgccacggttgtgctgattttatagacagggaaactgaggcacagataggtcaagcagctttccaaagccacccagataaaaatcagctgaccagtctcctggctcctgagtctgtactccagcggctccaccaggcctctgatttcttctttgtttggactccccttaccagctttccctggcctccacccatctctctgtctccttttaaatggatcatttagggtcttctgccagaaacccaccatgtgatgctggggcctcggagccctaacccagccaggactccggctttaaaatgtgcaagcatagctctttcaataaatacaaaaataagtaaattaaatgtgcacaggtgacatttgaaaagatgaatggatgagcaaaccacctcctggcctccgaatgaacagagtcaaacaacttctcgcccacgcctagcccacactggggattcggggagggaagctctggagaaacatcatgattcctctggaagcacccacctctaccacatcagggtagaggagaggaagaggacagaaaatcacataagcaggcacccagtgtatgccacagccatttcgtctcagcctgaagaggctaggagtcccaccttggcctcagtgtcagcactttctagatggggcaccgaccagttagaagcagagtgggcctagaagccaggcctctggactcccttgccttgggcctaggaggtcaccccattgctgctctaaccttcagggcacttagtttctgaaccaccagctgtccttctgatctcctttgtagaccctgggagcattctgtagaacatagtgagcctccctctaagaggaagggggcaggtgacctcaggagaaggctggagaaaggacaggtggagtggccttatcatgctgccctgcctcagttccttagaagtccccatccccaaagagaagaggaaccaggctatgtcccacaccccaaatctcccaaggaactaaggagaagctttggagatgtttccttgtcgcttgaaatgtgtttggccatcactcactggacaggctgagcaggccccttaaagtgaaaaaacaaccattaacggggacagccagaaatcattcgtctgtcatcaaagggaagtgaagtctgtgagggagacagcctgggagcgccggggcagggtcagcgggaagggagagattaaacacccagctgtacatcagccctgctcggctcagcacagccaggagtgggcagaggccagcaggagagggagggccagatggggacgctgatggggagaggagagagggagctggggggtggtggggggcaaaagcacggctagggttcaggtccaaggaccctttggtgaaagcaagtgacacagcaccggagtcacatatgaagcattttgcttgggtggcagcaagagctttgttatgggtaaaattgagtcccaccagaagatacagtgaagccctcagtcctgggacctgtgaatgtgaccttctttgaaaatatagtctttgcagaggtaatcaagttaagatgaggtcacaaaggtggcccctaatacaatttaactgatgtcctgagaagaagagagaacgtgggcagagacacacggggggaatgccatgtgatgacagaggcggagatggagtcatgcggctgtgagctggggtacccaggatgggcggcccccaccagagacggggtcatgcagctgtgggccacggtacccaggatgggcagcccccaccagagacggggtcatgcagctgtgagccacggtacccaggatgggcagcccccaccagagacggggtcatgcagctgtgagccacggtacccaggatgggcagcccccaacagagacggggtcatgcagctgtgagccacggtacccaggaggagcagcccccaccagagacggggtcatgcagctgtgaaccacggtacccaggatgggctgtccccactggaagctggaagaggtggggaacgattctgctcagagcctccgagggagcagggccctgctgaggtcatatgtcccatcctcagcatggcaatagagtctatttcggtggttctaagccactcagcatgtgactttgttactgcaaatcccaggagtgaattccatccctgactttattctccaataacactggaactttacacacacacacagtccccaatatactaaacatatttctttgtgtctaacgtcaatgcttcttgctgtcgcaatgagactactttagcttcagcagggtctctcatcaccgctgtgattctcctaacagaatatgggactaggtatgatatttgctattaaacccataacataatatatatataatatacccattttataactgaggataatgtttatttatttattgctcccacttaagcaaaacacttcgtgcgtgaccctggtgctatgtcacttgctttcaccaaaaggtccttgggcctcttcccatttgataaatgaggaaactgaggctagctaggaggggtaactgggaggacaaccatcaattggtaggagagtctcacatttgggcacccatgccagtgacctgtcttctgcctctcccctcgtgggctgtggttaatctacccctaagtcaggccctacccggaaggcaggtgagcacttgacaggagataagtgggtggtccagagtcttccctggggcaggagctggggctaagcctgcagaacctctgccctagccagagatagaggtgctgagttgtggctacaccgtacaccccagcctcccctacagcactttcctggcaaatgtggtctcggccatcaagctgccaatggtaagctgctaggccccctgagagtaggtgtctgccagtgtctgcccagcccctaacatggggcacccctcccgctactcctggccaaagtggtatgagcaccctcagagcagctgtgaggacagctctggctggggagaggcagctgggccccagagggctggggcagcagtgaagggaggtgcccggggggctgcaggggatgggctgcagtgtgtggaaagagctgcctgccaggagctctccacccttctaaaaggtggaccagggccagagccaggctctccctgctggtggagcggatgtggggcatggctaatccccaagctgcagatgacatcagaaggaccaaggctagctcgggcagcacacttagcacatgggcgccttgctgggtgctccatcccatcccctctcaacatcctcacctctatcttagcagggcaataccgcaccacccccatttcacagacaaggaccccgagataggtagaggggtgagtgcccgtggtctacttcatggcgacttcaaggccagagctcgccccaccctccctccgtctctccctgctggctcttcatttctcgtggcgtgtttaccttcctgattttgcctgcttttgtttggtttgatatgaaaatgagtttgcccagaatgcacagcggcagaaggaagggggcgcggggcggagtcacgctgagtgacaggaatgtgcagacgttgaattaaaagcagcttggcacaaacagaatccggctacggaaaattcaaaatgtatttagagccgagtggaagatcctcgtcaatcgggctcatggtttggtggaaaccacctaggctgggatgcaagtccaggcctgttcttgcctgtgtgccctgaggagagccccaaacctctctgagcctgcctcttctgctgataaacagtgtcaatggcatctcttttacaggagtgtcgcgacaaggattaaataaaacagcatctgtgaagtgcgtgttgccaactgccaagtgtcatacaatggtgaggttgtatttttggattgtctgcttccagggatgtctaaagtacctgggactggcccatctcatcacagtgcaggcagtgcgctggccccaagtccctctctgggggctgtgcctctctgtctgaccctccacgcttcccatccctggtgccttctgaggtgggttcccagggaccagcatggctgggagaacaaaactgaggttgtgacttgcctgacagcagcaggggcagcttctggtggggatggctgctcctgtgatggagggggtgctacaagagagagcaggggtcctcccatctgtacgtgcctggagcgaccctggcttggcctcctgggtgcctgttggtggagggggctggtgaaacagctcagcaggaatgagggaaacctgccacaagcgaactccagccagggcctggtggtgagcagcacagggctctcaatgagcagccgggcctggtaagcagcacagtggccctccgtgagctgtgccctgctgggcaggctgggcctccgtcccctcaacgaggaggggtggaggcagggcaggattatgaggcagcaaggggagagggaggacccaggggaagggccagccacggagaggcagtagtggaggggtcttgggattcggggcctctagcagggccaggctgggaaccgaggacacttggtctccctccctgggcctgcaacaggcctgaaattcatgccatttggtggccctctttaagaacacaaaatatcaaatataaaattaggtgccaaagtccggaaagggcaggagattcccggaaatgactgcagtcccacaagcacccagaagtgaggacattcataagacaccctcccctaggccctggagagcgagactcggatctggggagattggtgtgagtcctgggatgggggccacacaagttctaggccacgccccctctgcagcataggcaggtcccctccagggcgcagtttcctcatctgcaaaagaggggatgggagaggggaatctgaaggtctttcccagctgtcatttgttcattgcttctgggattttatgaatagggatgagtgaccggcagccttccatttactgggggcactcagctccctgccctctcatccaggatgtgaggactccagaagggctggggaggggaggaggaggagaggctggagtgggatggcctgccctccctggggttgaggcagtgatggtgcccgcaccctcgcaggtgtggtgtgtgtggggctgtccttccgatgtcctcaaagaaggcacaccagggcaggtgccatgccgctcatatcccctgggaaaagattccccactctgaggacaggtgtgtggcacagcccatccctattcctccatgtgcagatgcagagtctatgtaagcgacagcccaatgattgcttcctcctcccaccagacagagaaccactcttcagaggaaaatatcaccttccccagactcttccggcaatcgacacaggagttattaacacaagggatgtgggctgggcaagtgcaccttgatgcagatgtggccgtgagtctgagcccaagaagagccactggcccaggttggtgcatgggcactgcccttgggggataggggcaggccagcctcccaccctcttccagagtccagcctgaccagcttccaactaggagaggcacaagggccaggcccgccctccaggaatcccaaggtgcagggggagaggcagcttctgtccctgggtgatgccgctctacaagtgtgaactgagtgcctcctgggtgaggccacccatgggtcccagacactcatcacggggaagaggcagtcactcagagagagatgcaagtgctctgaaactgcaggcagagggacatctaggggacaccaggagagctccacagacaaagtcacccttcagcatggtcttgaagatgagtggaaatgaggtaacgtgagcacagcatgtttgggacacaggagatagtttcacgtggccaaaagtcagggcacctggaggcaaggagatgctaaaggtttatcccataatgacggtcccctgtatgtacaaagaggctttccacatcctttgccttcgagggactcacttaaactcccacaacaaactgtgaagctggcctggccctgtcatcctcaggttgcagcttcagtgacttccttcaggaaaccttcctggactccccagtggatgggctggggtctgccatgttgttctcatagttcctcctcttcacagcatcatcactgccattcccttgcctgtctccccacccgcactgagctccgtgaggacagggacttgcctggcacattgatctttgtgtcaccgtcaaagtctgcaatgggatctggcagaaagaagatactccacttattggatggaggagtggatggatggatggaaagaaggaaagacaaacggacagatgaatagatggataaacagatggatggatgaatatgtgtatgtatgcatgtgtgtatggatggacagaatggatacatggacagatggataatggatggatggatggatagtggatggatggttgagatacctagcagtcccagattcaagtcgcatcatgtcaagaatcacctcagaaagcatctaacttaacctcttcatttcacagggaggaaacagatcatggaggggaaatggcttccatgacacttttgaggggaacaagggagcagcaggggtcagagctcgggtgtgcagcacccatgccaggacctgctgttcatccaggctgctggggcggcaggtccttcaccatcaggagtgaattacagatctcaggtcactgggacctcaaccattccctggacctgtcttctgcagagacaggcctcccaagcacacccccttgtcaaggctctttcttccttgggcctccactccttcttccttgggccccctcctgttgcattttaaagattttcatagtatgtggttttgcctaataaagcattctcattgcgtgcacgtgcacgcacacacacacacacacacacacacacaaagtggaggctcaaggaagaaggccaccttgggggctgtggcctctgtatcttgttggggttcccctcccctggaaatcccttcctttagggagtgaactgcagggagcttgcccctgctggactcgctcaaccccgccctgcttcttccccagctgccgagcctgccgccctgcttctgacccacccctactgtatgtggttcgggtcccatggcaggagggggaccctgtggagagtgattgtgtcgccacctcagtgagactttcttcctaaataaatgaatgcacacacacacgagctacttgagagacaccggtggtaggggttagagatgagggggttgaggggaaatgtgcaagaacaagggaagggagagaaggggtgcgtttgagctaaacatgccctgccgcaagcaggcaaagggaccggaaacagaggagtccccatccccacccaccactgcctggggcctcagaaggcggatcacaaacatcacactgggaggttgggggacagcaccgccatttccagctgctcctccaaccagattaaggccaattaattgaagaccccactgagctggatgatacaaccatcagctactctcaggagggtgacccagcgctgcaaggctgccctgggatgccccgcctgtctgtccaggactggttctggtctcattcttccaccaacctcacagtgtgcctggggcctgggagagggtctctgaggcggctggggtcagttcctcctctgcctctcaggactgggttggatcagacaagttaggaggtggccagggtgtggaacaggtaggctgtagagcaaggaggcttgtgcaacccgggactcagatgaggccaatccctacatagactcagaccccagggctcaaaagatgggactggggaggggctggggaaaagacaccagaaaggcttttcaggaaagtgttgggggaaggagtgctgtcgggggcggggggtgaggagaggcagagagagagatgggaagcctggacccaccccagctgccccctccgcctttctcccctccctgaaggtgccagggcaggcggaggcagagttcagacctgccctctctcctgtgcaggcggatgcaggcggaggaggaaagaatcaattagttcattagctgacacgtctgtgaacatggctcccgggacttgacgggcctggcggccagtggtggtttaataggcacttttgctctgaaatgatacctgggccagcagcttctgccacagcacggggctcgcttaaagaggagggagccgcaggcagggcagagaaagcaggagaatgtggaacagccttggccagagaagggaagggcccccacccccagtcactaggcaggccacactgcagcccagtcaccacacaggccacactgcctcctctctggctgaccagagggagcaaggtgtctgggcaaggtccctctcaggcctgcctggggccatggcctggactgggcagcaggtgtggctcagagacccctggcatggtggtggggagacctcgcttcctgtctctgggtcttggggcccttgtgggtctgtggagtgacctggccaggtgacccataagtccctttcagttctgacatggcaagatctatgatctgttggggaaggtacatttcagaataagcagactgatttttcaaatgcccaaccactcaagttatcagggtcttgagaacaggacggctcagagaggtgcagggatggtacagacaggtgcagagctgggatgcaaactcagattccctggaacccccagtctgcactcttagccacgtccttgtgctgtcctgccgtgacactgggaaagccggacttgactctggagccaggcactgatccaggtgcttccctccctcctctgtatgcatccccctgagtcagggtggttggtcctagcctgccctgcctagggcatctggtctggctttagccaagtctcctcttttggacacagctgcaagtgatatagtcagtgtctcacagagtccacgccctccaggcctaggcatgttgcaaggctctaagccacgccccctctgcagggcaggcaggtctctagggctcaacttcctcatctgcaactcaggggatgggagaggggagcctaaaggtccttccatgctgttattcgtttattgcttctgtgattttatgaatagggatgagtgacctgcagcctttgatttactgaagacacggaggctttgggcttggattgggtaaaaggctctgaagctagaccaaccactgtgcccagggacaggacgaacctctctgtgctgcatgtacgttgccagctcaatagggctggtctgcagcaaggaagccaccgaagggtacagatcgggggatggggacagcggaggctcagcaagtcctgtgtcccattccccacctcccaatagggcctgtctgtaccaccccagatagggtagagacaccatgaagatgttcagaaggtcctcaatggtctccttcaagctcttggtcagaagggagggagggcaaaggaaaaagtctgttttgagcagttcagggggtccggggctgtgctggatgctttttagatttttgatctcatttgatcagatctgctgaagtgttcttaatggctgtgttagtccattctcataatgctataaagaactacctgagactgggtaatttacaaagaaaagaggtttaattgactcacagttccgcaggcttactaggaagcatggctgcgaggcctcaggaaacttacaatcatggcagaaggcaaaggggaagaagcaagcatgtcttaccatggcagagcaggagagagagagatggggaagtgccacacacttttaaatcttcagatcttgtgagaactcactattacgagaacggcgtgatccaatcacctcccaccaggccccccacctttaacacgtggggattacaattccacatgagatttaagtgaggacacagagccaaaccctatcaatggcccaatttacagattgaggaaactgaggttgagaggttaagtcacacgctaatgtcacggggctaggaagtggcagtggtggcattcaatcttgggacacatgccctttctgctgccctgcagcttggagaattctagtgctgcagctgttgggagagagaggattctgtcacccagctggtggtgcgacctgtgcctccagaaaccctcttccctatcccccctgcccccgagtgggtcctcctgtccacacagcatcaaaccctgctttcctgctgctctctaagctccccctgcagcttcctaggcacaggatgattattcctcctggggtgggggacagataatcctgatcccatttgtgggacacagaaaccgatgccaaggtccaactggcacagaagctgggagcactgggcttcctctgcagaccaagcttgctggggttcccagtggcctagcttttgatgcccagagggcagtgtgccctgctcccaggaggccctggatagcctgtctcctccctggggaggaaatgaccttgggcactgcccagtccttgcacactgtctgggggaagtagagggggaggaaatcaggcttctctctcaccaaccaggctctgcatggtggggggccttgggcctgcacacttaagcttgctgctatcccacggagggcagctggaaggtggcttccctggggcccagcccagcctccttctggccccagttactctctcagacaccccaagatgcgtcatccatgccagccgctgaagctgtcagctctctccttctcagcaccactcagagtctcaatgacaaccccggctgcctcctgaagagacacgtcaaggactcctgtccaaatgacgccatcagccttcccgttgttggccgaggtgctgggcaccagcagcccccaccctggccctgttgctggctgataaaggaacaatttccctgcgaaggaaaaacgtagcaagcagcaattttcattcatgagaaagctcttaggcaggcagagaagccggagtgaggagcagggaggagtagaaggagagaggagtgggaagagaggaggcaattgcctcctcctggcagccctccttgattgttgagcagctgccagccacctgggctgctcactgttgaagaaagcttcccatcacttcctcatgactcaaagctctgcaggtactctttgccctttagcttgtacctgattaattaattttcagttaagtgatttgatccgtcatccattcacccaaaaaccattcctggagcacctggcatgtgctgggaatcgcaaacaaagattcagcccttgccctcaagttgctcatagaccaactgaagaggaagtcttggtaaggtgtcatgctatgggggaagtagatggggctggatgggtcagggaaggcttcccggaagagggagtgtctaagtcaagccctgaaggatggatgggagtcagccaagcagagatgggggcaagttttaggcgaggtgaacacacaaacagcaacccggtcagacagaatgcggcaggtcccatcagccacagtgtgtgggagaggggatggggggcagagacaaggagaggggtgagagcggggctcaagatgtgagcgaggtggcatgatgagaggcactgaagggtttcagcagcaacagatcagatttctgtaacagaaagatcactctggctgcaacgtagtggggaacgccaagtgggacctggtcataaccaggtggaggggtggtggtgaccagaatctggaatgagactgtgggtgaggaccgccgggggtgcatagaggcagatgcatgcaagacactaatgcacccctcccgctgctctgcactgtgtcccgggggcactgagccccgggtttctccctctggttgcaccagccaggccccctccctacctgcccctttcctgcatggcaggtctagtgctcctgactgtttccaggtcaggttgagctggcctggcttggaaatatgcttgatggagttctaagcctgctgcagcagggggccaggggtcagggaggtggcagactgccaaggtaggagcctctggttctccccggcctcctagcgactctgctctagggttaacggttctgaaatatatgctgcttaatgctacgtccccaggaagggacccctaacctgctagccctttgtcccgctgggaaaatagctcaattactgccaaaatgagaagctgtcctggggtggatgaagtagcaccaaaggataattagaatgggctggacatgagcagccacttgtttggaaaggtggagggccacgacacagagaccctgggtggcgggggagtcagggtggcggtggaagggcaggagggacccaaggaagccacagagcttttgaccgtctcccattcccccacccctaccctgcagcttcctgccacacgtctcttcctgggatgttaaggaggctggcatggagtcagagtccactcaagaaagcagaaactactggctatactcgcacagaaggaatttgctacagggaactggttgcaggtgataatcagcgagaagcccagcgggggacagtgaggtaacccagagatcggtgacacaagaggcctctaccatccctaggccggaggggtccagggaggaagtgaggttgctggatcccagggcgagtcacccgtccacagggagctggagtcatgagccaaacgcagctgctcatggaagccagtggaggcaggagggaagggagagaccccagcttctctcccttgcctacctcctgtctcctgtcagtgcttcccactggccaagcctaacctgaagccagctgaccggggagcctgggaagccaggaagacagccacctgtgatacaggacagagcagaggcaggacaaggaaaggacctgagaggtcacagcccacgaaggacacagtgggtcgaggtggtagcctgaagccacaaagcacgctagccggggactccacgcgcaccttgtcttccctcccacactgttgggtgatggcggccggctccccatcagcttctggtgccttcgtgataaatgcccacacgctcccaccccagcccgattcatcaagctccccgtggcacgttgcatggccagagaccttgcccaccaggagcttaatctcccagacaaagaacagaaacgcggcctgggccagagacatataacatgttgccgggagtcactgacggtctaagtgagcccaggagcctcgcagctcctgccaggaatggggagggggcggagcggccgaggccttcggttttctccctccttccatctctggtgtcaggggtgacttggaaaggataccccaagtttctctaggccattcttccacctttttctcaacctaacccctcctggaccaagcaggctctaatacagctgttcctttctccttccctcccctccttccttaacatggattaaaagcctccaacacactgtttgctatggacgctgtggatgccatagcgagcaagacaggcctggtccctgccctcacggtgcttacacacgcagagcttctgcaaccttccctagttgtccccctaagggcagggggaccttcagaccaccccaccccgctgctttccaaactcagcttccaagaggaagctgagacccagtccatctggagacccaactccaggcttcccttctgtctccaaccccttttgagtaaaaagagggtcagagaggagagggcactagattcagggggctgtgattggctgccaccagactgatagatgggtgaagagaccaaccaagactgtgggacagccagggtggcaaggcaacctagagtcaggcaggtgccgctgcagtccccaccgcctgccccccacccctcggccagcctgtcccccctgtctggggcccagctctaaatctctctgacataaaatattgtcggagagccacagcacagagagattaaaaaacaataaagagaaagcgaaactctcgtctataattaccagcctctagccggcagcagcagaaacgcactaaaattttaataggaaccactgcatttaatttaacgacacattttttcaattaccagaataattgtcttattcataaaatgagtttcaataaagagggtaattttcctttgtttttattattcatttgtgaaacatatttgagatagaaccccctcatgttaaggcagcttggcgaggacgcatgacatctgtgtcacgcattgaaactggagtggcgcaggggaccctcctgagggggtggccgtccacattgccagctgatggccgagcggtcagtggtcgaggcgcaggtctgagtgtactcggccggagtacccatcatgagccacttagattagcttctcggcactcaagaagtacgtacgagcatcacgcccacttgagctatgagaaactgaggcataaatgggttaagtcacttggcaggatacgggggaacaggatttgagcccggccaggctgactgcagagcttgaggacggtgctactaccctgccaatggaccccgctgtaggctgcttcccagacgaagttccctaagcgacttcatctttgaaccaactcatttgcacttctcgctctggcttcgtttacactgcactctaagccctctccttggcaagttctcaactcgagagcccttgccctgagcctctggctggcgctcagagatgggatgaactgtttggagaggagccgtagaggagaggctcagacccgtttgggttctgggttcctcgagcaccctaatcccaaccctttgggattggctgcagctcccaggtagggcagacggctgcagcgtcacgctgcttctctggatggatgaatgcaaaggcagaggcttctgtgggggctgggagggaagggccagagggagctcttggccccactctgggcatggaggtggccttgagcatggaagcaccttctggggtgtgtgtgtgttctgaataccatcagaggcaagaggcagagatggggcaggacaggccacggggggccagtggtgggagcccaaggctgcctccagtagggaaattgatattgatagaccattctcactgtcaagggctttgagccaggacttactgcctatttaataccagggtctccatagtgaccctggaaggtggatgttattatccccttggtaaagatgacaaaactgaggcctcaagagatcaaacaagtcctgcccaaagtcactgggccagtgagcagcccagtggtgagtcacccccaagccctgccggctgcacctattcctatgatggtgtttcctgcagggagctgccctctcagaagccaggatagcacaaggaaggacagggggggacagagaggtttgaggcccagggtcacccctgagccactacctggccacagcctccatcccacctgcaatctccttcctcgggcctacacctcctgcaggtgaatagcaccacccccaaacccccacccttgttacagcatagccttcacccagggatgccagtcacccccttcctgaggaggtgctggcagagggggcatgaccagctccagcctgagcctcagattcccttcaggctttttgggcataagattggatgcaggagtggtggtttccctactccctccctaggtataaatctggcctgcagaagacctcttcaaggggagatacctagcagccccaacacatccccctgaagccctggcttcttcccattgaggagaggacaggagcatggagggagggttactaggggagctggggccctgaggctcacagggagaggggttttatgtcctccagggggagctgggaccacctattcctaaccctggagcagatcccttgtcctcatcaacccatggtctctgccccctttcaggtcttctacttcttccaggaggccccctgatgaggacagggggcaagtcatcctcccctttggaagcccagtgctttgcgcaatgccaggcacacaggggcagctcatcaatccattatgtaaaggcacctagatgaagcagaaccacttccacactgttatgagccaaacttcctgcccccaaaattcatctgttgaagtcctaagccacggtacctcagaatgcaactaaatttggagataggatctttacagaggtaactaaggttaaatgaagccattggggtgggccctaatcccatgtggctgaagtccttataagcagaggaggtgagggcacaggctcatatggaggaagaacatgtgaagacacagggagaagatggccatctacatgccaaggacagagccttccctcatggcccacagaagaaaacaacccccataacaccttggtcttggacttctggtctctagaattgtgagaaaatgaatttccatcatttcagccagctagtctggtatttgttacagcaactgtaggaaactaatacacacttctgtgcaaatctctttccttccctggaatgcatcctcctctatctctgcaagtgtgagctctgtatgtcaagtcctggctcaaagtccaccttctccaggaagccagctgtgctgtggagctcttgggcatcctttgtagagtattgatttacacttatttatgggttgttctgtaaatgttacaaacccatatttgggttttattacaggatcaaaactctgtgagtttcctcctgccaagacctgagtctcttccatcttcaggagccctcgaggtgctctgagctcaggcagggccttggtgcccagactggctggggaccaggctgggaggaaggaggatgggggagctttgttctgggttggccctctgacagcgccaatccccatctccagccctggtgaaccctagagcttgcattgtctagctgcatatgcagccccgagctgggctatgggcacttggtcttgccctgggaggctatgaattgagcagaggagaggatggtaaccagagagagcaggagtaacaggagtgctgtctatacagatgagccagcgagggcctcatggagggcttgagtctggaactggccttgaaggctggcaggacttggactggttgagggcagggggagctcatctccagtggggagaacagctcatgcaaaggtgtggcatgtgaatgggagtattcctggcctgggggaggcgccattgggagcggtgcactggaccttggactccgcgcagctcatcctcgtctctatgtactgaggatgctgaggcccaggaaaggaaggggctggcccaaggttgctcactgtggtcaggcctctctgcccctgggcctcagaggggacttggaggtcactattccagtccctgccatcaggcaagaatggtggattagcctgaatcccctatcatctccctctctgcctcaatgtcccggagctcaactgggaagatgaggaagggcccaggtgggggtagaggaagtgaggggctgccaggcgccaagaccacataagcagcagatgtcggcggattagcagctctgcttcccaaagctgccggagccacttaatattctgcagaggggatcacttctctttcataaaaagcaaacacgggactgaaatgctgcagactccaaacacctggggaggtttggcggcttgaaaccttgctcctgggaaagacacagagagtcaggggggaccagggagtcagccctccttgctggccagaagcagtggatggtccctgcagggagacaggcagtggatgcacagatgggcttgagcttctggggtttccagggaaaggcaggggctttgggagacatgggggcactgtccatggggcttgggcttggggtggacagttggcaaagtgatggcactcagtggaagtcactgccaggaaacgacacatgcagggaccattcctctccctcttaatgaccccagacatcgggaatggaggcacagccactgaggcagatcaccaagatgggaagcggcaggttctttccaaacaaacagatcaacagagcaaaacagctaacagctttagttaaatacaaataattccaagaagccagcggcaagcttttaccttcggagtttgggttttttttattgttgttgttgtttaataaaggaagacgactttctttgattagacagagctcactttatccagatgggaaagaaatacaatggctctctcttggcttcctccgaagagccaggtatgtctgggcagcccatctgggcgatgctcactggacatgaggctgtgtatggtcagatgtttatgtaccgtgactcatttttggtagaggcattcacgtttgacctgcacatgattcttcttttaagcacacattttaggaaaaatatttgctgaattcttatgcggctgttggcattgctgttattgtatggttgttaccatttgttcccctttgggaacctgtttccggttttgaaaggacttcagtagatgttaataactcagcttgcctgggtggaagtctaacctggcagctgtcagcacaaattctggagccagaccacctgggttcacatctgagctctgccctgtattgcttttgaggggattttctaagcctcagttttctcttctgtaaaatgggggtgatgatgatcatagaaactctctcacaggggctttgtgaggattgtgtgagttaaacacacaaggaaattagcaccagattgacagtatggggctatgattactgagattggaaacaaaccttagcaaatttcattcttctaagctaggcaaaggccacgcagcagctagaaagtgcagacactggggttggccttatgtgggtttgaattctccagaatattctggctgtataaaaccgagcaaatcaatttctctgggctttggcctccttatctatacaatgggaataatgagaactcattcctcataagaagtaagtttcaactgaagctcatggaatgacacagttcatagcgcacgctcaacaaatggtggctgccccagtgaacaagctcgaccttgccaaggcttacctcaaaggctttgcaggagctgctgtacctcgagatttttttttttttttgagacagggtcttgcctgtcgcccaggctggagtgcagtggcacgatctcggctcactgcaacctccacctcctgggttcaagcaattctcctgcctcagcctcctgagtagctgggattacaggtgtgtaccaccacatctggctaagttttgtatttttattagagatggagtttcaccatgttggccaggctggtcttgaacatctgccctcaagtggtctgcctacctcagcttcccaaagtgctaggattacaggcatgagccactgtgcccagccagataaaatattataatgtttcctttcttcttcccatcctcctcctcctcctctctctctctttctctcttactttctttccctgcctcctaatctccctcttttctttccttccttgtttttgggttggaggtcctctttcaatagagggtagagagaacccaaagtgtcaaagccctgccattctaatttcctttcccattaacaggagttccttaaactctgtgagtccagatttcctgccctcagtaaggtctgcctgcagcctctaccaggtagtgatacgatgggcacctctggactcagcagtagaaatggcagccagtggcattgacctggattcactcatcctctctctcagcctctccccagggctccctggacaaccaagtccagctctcttgttctaggaccctcctcaccctgttgctctatccccctttgtcctgccccatccccaacaccatgggctgggtgccctgggggcacttagcagcccgagctgccacctgggagtgaagcgccttctgctgaggcaggaggggtgcaggtctgctgtaaaggggcagccccaaagttctgccagtagattgatggggagtaaagactctgaccccacagcctcactgagcacatgtcagaggggctggcaaatctgaaaagatgtggctgtgactagctctgcctagggttctgccagatttcctgtggaaccttccagaatttctccattaatgacaacgaccatgcccaggtagagatggaaagagactcggatgccttattctgaaattaacttcagttaggaaggaagggaaggagggagggaggaagggagggaggggagagggaggaagaaaggaaggaagggaggaagggagggaggaacagaataatattcaagcactttttcatggcactttaaaatgttcaagcacttttgcattgactgtatctccttttatcatccagcctgtgaagttcacagctcagcattattaggcagtggactatggaggacccacacacagccaggttcaaatccagcttcattagacagatgaagaaaccaaggcccaatgagatggagtgcctttcccacctcacatgggaagtcagtgcccaagttaacagaacttcagggcccccgcaccaagccatgtgtctctcctacaagatcctggaggatgggctctcaaatggggtctcaaccctccccctagataggagctctttgcctggcttctggaactgtgggccaccagtccctacagaatgagaggtactctcactcactgcagtagcggcctggagagaaaacgcctgcctccctggctctgtctgcagcctggctcccaggacgtggcctcatttcaaagactaaaaaggtagctgagaaacaaacgaaagttagctgagatgggaaaaccacccatgggaaggaaagaatgcaccatctcctccccttttctctcttctctatggggagaaagaaaaacctaaatactgatttcaactggactctcctgcctgcaccggggccccacaagcaacacccagatcctgaaagtatttgttccagtcaatggggcagagtgacccacgaaggacagagcatgcctgccgagttcacacacttcctgcctgcctctgggaaaactatttaacctctctgagccttgggtttcctcgctggtaaagtagagatggtggcgatacatgtgccatggagtggcaatgaggatgaaatgggacaatgtacgcaagactgttggcaagaagcaaggagttgataaatggaatagacgatataacaattacattgtaatgtgtattataattctttttgcgggctcttgagaatgagaactctctgccaacgtggagaatgagaggggcagatgggaagaacactgagataagagcagtaagtcttgagcaggatggtgtgggggcaagctctgtccatccgccactccccactccgctccctgtgccccccgcccccgccaccataccacacatgtcaccatactgtggctgctctccagcctccgaagggccaccccacaggcaggtctgcagcctgaacaggatgggacaggtaaggttggcccctccccctttcttttcttccctacctccctgtcctgctagagacaagtgcccctaatgcctgtgctcccgaatcataatgccacaaaaaccttgctgagataggatgagagaaagagagggtctgagacaactcaaagcctttagtccctggcctgatccccccagggctgggcaccagctggttgtcttggcctcactaagcatttcctctgtatctttagcttgctgggctcagtggcagtcacccctgggagggatggcatgaagggctgggggttcctctgggccatcacaccacgggaagcgggtctatggccccaagggtcctgccttggccctactgagaccaggcagtgaactatggaggacccgcacacagagccaggttcaaatccagctaagggcaaactgcctaagctcttacagcctcagtttcctcactaaaaggatgcagtcactcctagtgccaccaccaaaaaccacaataaatgacagacaaggtgttgttagaaagactgaataaccagaaatgttcatggaaatgacagctgggctgcagggctggagctgggctggaggctgctctgcacccgaccgtgcctcgcattaaccctttattgtttttgtttgtttgtttttgagacggagccttgctctgtcgcccaggctggagtgtagtggtgcatcttggcttactgcaacctccacctcccagattcaagcaattctctgtctcagcctcctgagtagctgggactacaggcgtgcgccaccatgcgcgtctaatttttgtatttttagtagagacggtgtttcaccatgttggccaggctggtctcgaactcctgacctcaagtgatccgcctgcctcggcctcccaaagtgctgggattacaggcatgagccacctcgcctggcctcattaacccttcaggtgtggaacatggaacatttcagagatgtcaggacagcagctgtttaccagctgtgtaaatacagaacttcaaaatccaagcacccgcatgttggtggggagtcctggggaccacacaccctgcttacagggctactgtgagggttggtcagatcatggagccactggtgcccaccccctcccgatcctgattcaggagcacacaggctcctcgaccagtgggtggcgtctgggccagcaaggacttgtggcaggagacaggatcctctttgaggtcaggaagcggggcgtgtggggtgtgccactgggccaggcatgtccctgctcatcccacccagaccaggcacagcaaaatcaggaccccctcctcaccccactacccacaggtacaggaaagaggagagacccagcctcgctcctggtcactctgcccaagcttttggggacctggccagtgctccaccccagactccacaacttggcatttctagctgtgcccgagatggggccaagggaggggccaagcgagctattttgggtctggaaagagctgtggtgggtgtgaaagggagacaattacggggttggtagggccgatgccttccacccacaccacccaccccacctgcggtcagccctcagcctggcctcagcacagatgatgacgagacctagggggaagtgggaggtagagaggaaagtctccaaaaggggctagggtagggagagaagacgtcagcacagggccacctgggaggaccccaaatggtgacgtggctgcagagttgtggccaagaagccatggttctctgggctgccatggagaaggagcagtcagccgccttcttcaggccatactgtgtggttgttgtcctgggctctaggagacatgacacagggtcattttgggggcactggggatcactatgtcatgggccatcttcctgtacgtggctgaggtctggcctctggtggcctccaatggctacacgcctaggccaggaacaagtagagtggccttagagtggggagcactgtgcagactcctgtacggcctcccctgaattgagtctctgctctcaaggactctgttccagggctggatgaagggagccgaatgagggactgtgtgcaacatataaaggaggggctatcaaaaatcctagtcatcaagataaataacattgtaggccaagtgcagtggctcacgcctgtaatcccagcactttggggggctgaggcgggtggatcacctgaggtcaggagttcgagaccagcctgatcaacatggtgaaactccgtctctactaaaaatacaaaaattagctgggcgtggtggtgtgcgcctgtaatcccagctgcttgggaggctaaggcaggagaattgcttgaacccgggaggcagaggttgcagtgagccgagatcttgccactgcactccaacctgggcgacagagcgaaactccgtctcaaaaaaaagacaaataacatcttaatataatatttcaaaggatccaagtcaaagcaaaaaatttaatatgaacaccaccaaaatgttacaaaaagacacgctccaacggggctgcaacagcctccaaggtaccaggatggttcccatctttatcggacgttttgatattttgttccttgtggaatttttgcattaatttgcattttaaaaatattacattcaaatatcatttgtttaattactgaattttgggagcacccccctaagattttgggcttggtcttgtatctgttctctttttagatccaattaacttgcctgttcctcccacctccctccagaagttaggccaggtgaaaacacaagagaacaacagccacgtggaatctgggggaacatgaggccaggcacttctcaaagaagagagagagacaggagaggcggggagaagaaggcaggcgtgggagggggttgggaggtggttctgagtgtctgtccaggctgccggacaaggatgaggatggggagatgaggatgagacctggggctgggactgtcagaaagagtggggaaaagggagagagaagcagagcacagagaaagaagtaagaaagaaaaattaccagcaaggcattctgtgcggaaggcgccacgggctgctggaaatgccacgtctgcgttttgtaagctttactaagacgtgctaactcatttcatcctggcagcagccgcacgaggcaggttatacctcttttcccatttgatgatgggtaaattgaggcacgcagaagcaccaaggctgtagggctgtgctgaagctggaataccagcccaggcagtctgactcggacctgggcacttgaagccatttctggaagggaggaggaaggcaggggaggggaaggacagctccgctctgataccgcctcactgcctgccgccccaccctggtcctcgggccattgctggcgaggaggcttggacaggcacgcaccatggaggagactcatggcctctggcaaggctgggataagatgaagtgagtcactgtcaacttctcttcgaaccagaaatatcctcccccagaagtatcaggcaaatctaatttttataaatcacattatagctcaaatatcttagggaattcacaacttataaacatttctggctgggtgcagtgacttacacctgtcatcccaacactttgggaggcgggggcaggagaatcgcttgaggccaagagttcaaggccagcctgggcaacacagtgagaccccacctctacaaaaaataagataaaaaattagctgggtgcggtggcacacggctgtagtcccagctgctcagaaggctgaatgtgggaggattgcacgagcccaggagtttgaggctgcagtgagctatgaacaggccactgccctccagtttggaagacagaatgagactctgtctcttaaaaaaaaatctttgtgcccttttgtaatcattctctaatatatctatctctgagtttgatattcattgagcaactttgtagtacaacagtgctctgaaagggtcaattttaggtatacatattttgggggcagggttgagatgagtgaaatcccatttcaaatggcctaggtgagtcttcttttttctctcactgatttttttttttttgagacagggtctccctctgtcatccaggctggagtgcgatggcaccatcatggcttactgcagccttaacgttcccaactcaagtcatcctccctccttagcctcccgagtagcatgtgccaccacgctcagctaattttttatattttttgtagagacacggctttgccatgttgcccaggctggcctcaaactcctaggctcaagcgatccacccaccttgtttcacacacccggcctcccaaagtgctggaactacaggtatgagccgctgtgcccagcccccagtaaatctttttgaaaacttcttttgtattcaccttgctttacgtttttctgtaaattcacacttcaatttcttggatttacttagagctgttcgatacggtaaccaatagccacatatagctatttaagttaattaaaattaaataaaattaaaaattcagtttctcagtagcactggccacatatggctagtgactaccatgttgggcagcacagacaacagaatacttctatcactacagaaagttctactggacactactggcttagagtataaagtccacttgagtccatttctgcttaaagtgaggcaggtgtgtattctctcctgcatctgagcccctgggctgtgtcgtcatctgaacaactgatttaactaattccactggatgtacgtgtgacccagagaggtgcctggtgtcctgccctgctccctccccatgacattaaaacgaaacagctggggctgggcatggtggctcacgcctgtaatcccagcactttgggaggtcgagacaggtggatcacttgaggccaggagtttgagaccagcctggccaacagggtgaaactctgtctctactaaaaatacaaaaattagctgggcatggtggcgtatacctgcagtcccatctactcgggaggctgaggcaggaggatcgcttgaacctgggaggcggaggttgcagtgggccgagatcgcgccactgcactccagcttgggggacagagagagactctgtctgaaaaaaaaacaaaaaacaaaaacaaacccaaaacaaaagactaaacagctgggctttgggcatctggtaagggtggagtggctgctgttagttaggtcaaccctttccccagatagcaataaacaactgcctgaggcattggagaacaaccaaaagcaggctgacactagagggaagtcaatgtttagaagatagaaatggcactgggtgaacttcccatatttatgggtatttgtttgaggtcaggctctagctcctgccaagtggggtggctaaatccagatagaaaatccagtcttactggcttaaacaactagaggacagagtttgcggcaaccgcagcagttggaagttgagggcaggaatcccagaaggaggagagccagagggaggagacctgaattctgtatataaattctacccaaaccttaggctgatctctgaaatatgtacacatggggccaatcccaagcagcccagcaaaggctagagggactgaacagagatttctgctactgtcaaccacaggggagagcaagtttggagtttgagtgcagggaagttacctgtttgctaaaaaacatgtaattcatgacatctaggatacattccaaaattcctaggcacatgaagaaacaggaaaatgtgatccctacacaatagaaaaggcaatcaatacagattgttttaaaacagctattataactatcctcaaggacataaagaaaaatgtggtcataatgaatgaacaaatagaaaatcttagtaggaaaataaaaagcataaaaagaaccacataaaaattctagatctctaatatggttcaggtatttatcccctccaaatctcatgtggaaatgcgatctccagtgttagaggtgcagtctagcgggtggtgtttgggtaagggggttcccccatgaacggcttggtgcccttcccatggtagtgagctctcgttctgttagagagctagttgttttttctttttttggtttgtttgtttgtttgtttttttgagatggagtctggccctgtcgccaggctgtagtgcaatagcgcaatctcagctcactgcaagctccgcctcccaggttcaagcgattctcctgcctcagcctcctgagtagctgggactacgggcgcatgccaccacacccagctaatttttgtatttttagtagagacgggtttcaccatgttggccaggatggtctcaatctcctgacctcatgatccacccaccttggcctcccaaagtcctgggattacaggcgtgaggcactgcccccagccaagagctggttgtttaaaagagcctggcacctcctgccttctaacttgcttcttctttctccatctgacacatctgctctccccttcaacttctggcatgagtggaagcttcctgaggcctcaccagaaacaggtgccaacactatgcttcttgtacagcctccagaactataagccaaataaaattcttatatatatatgtgtgtgtgtgtgtgtgtgtgtgtgtgtgtgtgtgttacccagtctcaggtattcctttacagcaatgcaaacagacaagtacagaaaactggtactgagagtggagtgttgctataaagatacttgaaaatgttgaaacagctttgaaattaggtaatgaacaaaggttgaaagagtttggtgggttcaaaaatagacaaaaacatgacataaagtttagaacttcttagcgactagttaaatggttgtaaccaaagtcctgatagaaatatagatagcaaagcccaggctgatgaggtttcagaggaaaacaaacacttattaaaaactggagtgaagatcaccctggttatgccttaataaaaatctgggctacactgtgtctatggcttagggctttatgagagacaccacttacaagtaataacccaagatatctggcaaaagaaatttctaaacgacaaagcactcaaaatgtggcctgggtgcttctaacttcctacgactagatatgagaacaaaaaaacgacttaaatttaacacttataattaaaaaaaaaaaaaaagcagagtgtaaaaacttagaaaatttccagcttggccatgaggtagagaacaaaagtgcctttccagtgagaaacccaaggcacttgtaagataacctcctgctagataaatttacatgactaaacgggagtcaagcacgaataacaaagacactggaaaaaaaaagacctggaagacatttggaaggtctttggggaaaatcccttccatgacaggcccagaggcctaaaaaatggttttaggggccaggcctggatccctgctgccctctgcggccccaggaggctgctccctgcatccctggctgcttcagctccagccagggctcaaagaaccccaggtaccattcagggctccacttcagagggcatacgccataagacttggcagcttccacatggtgaagcctgcaggcacacagaatacaaaagtgaaagaggcttggcagcttcctcctagatttcagaagatgtattaaaaaacttgggtgcccagacaaggcctgccacggggcggagcccccacagaaggcctctgctagggcagtgtcaagcaaaaacgtggggttgaagctcccacagggtcctcaccgggacactgcctggtgaagctgtggaaatggggctaccagcctccagacctcagcgtggtacagccaccaacagcttacaacctcaacatgaacaggcaccagactccaacccgttaaaaacagccaggggggctgtgccttacaaagccagaggggtggagctgcccaggccttgggagcccaaccctcacaccagtgtgcccaggatgtgggacatggagtcaagagagattatttcagagctttaaggtttaacacctgccctgctgggtttcggacttgggtagggtctgtcatttctttcttttggttgatttctcccttttgaaatgaaaatgtttacctcatgcctgtaccaccattgtatcttgaaagtaaatcacttggttttgcttttacacattcataaatttaaaacaacttgccttgagtctcaaatgagactttaaactttttgagttgatactcaaatgagtttagactttcaaggactattggaaaaaaatgattatattttacaatgtaaaaatgacatgaaatttaggaggccaggagtggaatgatatggtttggatatgtgtcccctccaaatctcatgtggaaaccggatcctaaatgttagaaatggggcctgggggagatgtttgtgttgggaggcagatcccttggtgcccttcccacggtaatgggtgaattctcgctctgttagttcacaagagagctggttgtttaaaggaggctggcaccttctccccctctctcttgcaccctctatctctctttttctctatgtgacacaactgctccctcttttctttctgccagtgagtggaagcttcttgagcccctcgctagaaagatgctagtgccatgcttcctgtacagcctatagaaccgtgagccaaatacacgtctcttctttatacattatccagcctcaggtattcctttataacaatgcaaaatggactaatacaagctgaatacaagatctgaaattaaaaatttattggatagatttaacagcagattgatgagaacagaagagtcaatgaatgtgaaaatagatcaataaaaaatacccaccctgaagaaccagcagaaaagaagactttaaaaaaagcccagagcctcagactggagatgaaggtctaacatatattatacatgaagtctaggaagagtcaggagtgaatgaatgcataaaaagtagttaaaggaataagggctgaaaattccccaaatttggagaaagacaaattgaagattcaagaggctcaatgaaccccaagcaggataaatacaaggagaagagtcgttaaacaggcgactgcagaaggaaggaacatgctttatcttcaaaccgctggacagcagggcccacctctctgcaggcttcatgtacttttgtgatacatcacatgacaatattgccatcgtctccctaaaaagtgcacacagggggcaaaggttgaaaaagcacctattatgtgctaatggcctttgtgtatattttcttaatttacactcatagtaaccacaagaaccaggaactgctgtctccaagttgttttattattaattttttaaaaaccaaaatcagcactaaggctcagagatgttgagtaactcacctaagatcacacagctagtagtaagagatagagctggggttgaaagcctagttccaaagcccatgttctttctttctttcttttcttttttttttttttttgagatggagtctcactctgtcgcccaggctggagggcaatggcgtcatctcagctcattgcaacctccgcctcccaggttcaagtgattctcctgcctcagcctcctgagtagctgggattacgggcgcacgccaccacacccagctaatttttgtatttttagtagagacggggtttcaccttgttggctgggctggtctcaaactcctgaccttaggtgatctgcccacctgggcctcccaaagtgctgggattacaggcgtgaggcaccgtgctgggccccatgttattttgtattcgtgcctattaacccttgcagcacattggaatcacgtggtgagggatgggggtggggattgctttcaaaagcaatccccacccccaacgaattaaatcagaattagtcagggctgcatccaggcattggaatttttttttttcagcccctctgtgtgattttaaggtctgatgtggattgaaagtcactgttgtacactatgctgcactctgggaaagatcagacgagaaaagaaaactgggtcaatcccactcacattggtagatgggcgatgagaacccccgcaaaggtcctcagaacggagctccgagccttgatctgtaagcctgtacccttccttccttgtcttttcctgatctctaggagctacacggctgtcaccactctcaggtccagaagatatgggggtgataaaagcggccgaggagcctctctgcagcaggtcctgagttacgggaggctgcagccatggacacgggacacttactctgggtgaaggatgaggagcaggacctcagcgctctaactctttcaggcttcggctggggaaggaagagagtcaggcggccccatgactctccccagagcccctcgggacggccccccagagcccctcttggggagagactgggactgctgagcttggtggacacagggcgaccaccccaggggcccagccttgctacctcccctccctgtttacacccctgcctcctaagcacagcccggcctcaacatgcatctcctaccaccccataggagtggtagaccccgtctacaccgggtccagaaaccacacaacccataggttctgtgagctcctggctctgttttctcaaatcgcagcagagcatatgctcaataaagagcctccaggtgcatgtgagggtgggtgaggtggctcccactgctggctgggtgagcagttggtgccgctttgccatttgccactagattagcccaaaaatcaaaaagagggggacccacccagcacccctcttgtgatgatggcggtgatggtgatggtgaggctgatggtggtgatgttgccaccttccactgagcgctgactacccgtgaggcactgaacaccaccatcagctcaccgccatctcgcagccacccacaaagggcactgctttagctctgttttacagatgggaaggctgaggctcagagaagatcaagtccttgcccgtggcagaactcatatcaaagccaggtcagtctctaacaccggagccctttggaggggccctcttctacccattcctgtgttcttcctgcccctcactggactgaactgagtttagcccgaaatgctcctcccaggcctgcagggacatggctgacctcacatgctctgtgccccctttagggtctctgctcccctattcctcctcagcccacagcctggggtcaagggtgactattgtgagccctggtctggtcctgagtggctgctgggaccttcccaatgcctgggtgaaactccagagaacgaactctgggccagcaggagtttgctgggaagtggctgcaggaggtggctcgggttttttttttttgagatggagtcttgatctgtcactgaggctggaaggagtgcagtggtgcgatctcggctcactgtaatctccgcctcccaggttcaagcgattctccagcctcagcttcccgagtaactgggattacaggcgtgagccaccatgcccagctcgggtctctttctgtcaaggcaatgaagaggctaaggagggtgacagaggagccccctgagccccaggcatggtgggctgtggacccaaccaccggcttcctgcctcactgaggcaccagggcgaagacactgatattcagtactagcaaccccacagccagtagatagtcaagttccctgccctttccaatgcccacaggacactctgggtcactcagggagctcggtggcccacccaggcccaaccctgagcccatcgatctgggtcctggggggaacatgtgggagtccagcccggtggccccccgggcgctctaagcagcctgtgcctaatgaccgcagaaagccattacagctcacttagctgtaaacagctctccacagcactcattagggccgaggagctccgagagctctcctcctcgggtgtggggcatgtgcccagcgggggctacgccttcttactggaaacaccgtttcccgcccggcctgccttccaggaaaggtgagcccggctggggcccggccagcgccctgccctcccctgccctctctgaccggggtctgaccctccacaggggctctctcctccctgggcatttcccagcctgcaggggcccagggacaggacaggcagagccccaggtgcccccttgacaacacatgccgggctttccatggccaacctcacggcccacggggaaggaggagcgcccgcggggccagctcccctgggtgggccagcaccctgggcatgccgggccaggcgggtgcccacagagactcccctcctccctatgatggggatgtgcctgggaaagatggacagttctggggcctaaactgcaggcggacaagacctcggcattcagtgcaggtgttgtcttctaccaaatcagagctgtccaaatggttttagattcggtccccacaaaatcctgttgagggtcccaagagatataacagaggtaagggtggttgtcctcatctaagtgggggtgagggtggggtccacagcctgtctgttttgctgtttccctccctccccactttgtcctatcccctacctgccgtgagggctcagttatccctgtagaattctggggtctgcagacacagtttagtaaccactggcctgcaccacgcactgttttctgtgcctggagcgctccgacccctcttcctagccagctcccatccacccccacatcctgatggcaccctgtccccagccctgccctcccttcctctcatgccagcctccctcttatcacccagctcttcaccttcttagcatacccctacattttccagtgatatttctatttgtgtagttatttgcttatcgccttcctattccctgagctctgtagggaggaagaccatgtctgtttttgtctcatctccagcatgagcccagtgctaggcacacagcaggcagtccataaagattgactgactgactgaatgaatgaatggtctaagcatatgatgctcagcttgctggagaaggggcatcaacatcttcctatcattgaccccttctgtgtcctcagccctcatgactgatgtgtcttccatctactcctccaccccaatctggtcagtatctacttgtcctttatctttcatctgagatacttcctcccggggagcctcccagcgccgtcaaacacccagcatgctcacttgtaatggcgccttcttatctctttcttcctggaccaggaagcagagcacaggtgtctagtgtcaacacatgccaaggtgtccagtgcaggtgtgccacatgaaggaacgggtgactgccccatggccctgctactatggggcaacaccacctccttggaggctgatgacctgctcatataggatggggcctctccatcctccacttcctcacaatcagcacccccagacaccttcccaatgtctgagcaaaactctgcagagaacacactctgggccagcaggcggtcgttgggcaatggaagtgggtgcacgaggtggctcgggtctctctttgggttgagacaatgatgagtctaaggagggtgagtgaggagcctcagagctccagcgtggtgggctggggacccaaccatcagcttcctgcctcactgctgcaccagggaaaggacactggtacctggcactagcaggcccacagccagtagataggtcactctgcacccccttcccaacccagttccccagaggcttctccatctcaggaatggtcacctctacccttcacccagctgctaggaccccaaaccttggagtcgtcattcagtccatcagctcggcacatcctgctggctctacccgccaaacgcaccttgaatctaactgctgctcaccacccatgttgccatcaccctgggcagcaccaccaccagctctggcctggaccacagcctcctcccaggcatgcctgctcccctccgctccctgagccttagccccacatggcagccagagggattgatttaatgcataaattggatcatgccactacctggctcaaagcctccagtgactgccactcacacccagtcaaatccagagtccagactgcaacctgcaaaggcctgtgtggatgggcccctggctctcctgtgctccagcctcctctccacacatgcccaaccctgccctttatccgggccttgctctcaggggccctgggctccgccgtctctgcccccttccaaatgtcacctccccgaccatgaggaccactccagtgccactccccagacctgctggcttcttcctggccttcgtgggccctgtcccttcctgacactaccgctcacatctatgcgcttcctcactgtctgcctgacctcaggaatggaagctctgcccacatctatgcatttcctcactgtttgcccgaccctcaggaatggaagctccatgaaggcaaggacttttgtctgtgttgtttggctcctgtcccttcagcccctagaacattgcctaatacaccaataaatatttatcacatgaatatttatgtaatatctattaatttaggggtaggtgacacaagtatttgttacatgaatggatacttttaaatccattgttgattaattgatcagttccccttggttaaatttgtttataaaagaacatcagatccaaccctgatcacagctgacatcacgtgcatgcacatgtgtacgtgcacacacaagcacacatgcacacatacacgcctcgctgatcagccttattagttttttctctccctttttcccagtagctgcaacttcaggagactaccttgtgtgtgagtgcaggagatgggggtggatctttccctcaaggccagccctccccaccaggctcagctatcagccaggagacaaggtcctctgtgggcacaccatcacctctacctccccttcggaaccaaggcaagctctaaatgccttgcccttgcttccttcctaaacatttaatgccatactggccttctccacctctctagacactttctaccaccctggcttatgctagaagatcagatgctcctggtaataatgacccaagtacaacttaaccaagagggtgagtcttgagtcttgagaagtatgagtctctggtggaaacccagtggaacaccctagagggtgctgggtttggaggctataccaacagaccaagagttcaagtcttgcaccttagtagaggccagccctaggacttagggaagccatctgtcctctctgctcaaggtttcagtgactggttggctaaaggactgctcgtatagtctcagacaattaaccttccttgagcccctgttagtgggaggctgggctctgcctgggtttgggaatctggaagatgggcatatcccctgggaatcaaacagtcctggctctgctgcttccccttggggtgatcctgggcaggctgctgaagctccctgggctccaggctcctcaatggggcgaatgacacctgcatcgggaagatcaaagccactgctgagttctaatttgacctgggccatcctgtgacaactcttgtaatcaaagaaaccctgggttctccctcatggactccaaatctgccccaatcactccagggctctcagaaggagccactctgaaccagcacttcattctttcactcgttcattcaccaggtatttccagaacgcctgccagttccaggcatcatgtgaggctgtgaaaagtggcatagcaatgtggacgagagcttggattctgaggtagactcatttggggctgaagcactatctcttgctagccatgacctgggggcaaaacacgtaatctctccgtgccagtctgtactatatctgcagaatagagcagtcatcacagttatctcaccaggtggtgatcaggattaaacgagttaatatgtgtaaagcatgtaggattgcgtctggcacttggcaagtaagatatgattgttgtctttgtaattatggaattaaagttgaatagacaatctttgtgctcaaggagctcagcttagcgtgggagacagagcatacacagacaacggcaacgcagcagcgctagggctaggagaggaagacgaacaaaagctggggctgtggattctcacgaaggggcagggcctgctcttgaggggctcacagtctcaagggggagaggaggtataaaaagggagagcaaagtcaaccaaaattccacaccgtctgcagcccaatacatgcagcactgagctgggggccgtgggggatgacttcagcaaaagacacgcctgtggtgggatgaggaagtttgcaccaaggacagaggcagggcaactaggttcctattgaacaggaccaaaaggcagccaaattctcgaggcaaaaggggctgcctgggatgcctgggaggaaggtgagtgtgggaaagttaagatgatgaaatcatgaggatgggtgtcccaaggaaaggaagggaaaggcatcccaaagaaggggagggaacgtcccaaggatgagaaagtcatcccaaggatgggaaagagcatgccaaggatgggaagggtgtccccaaggaagggaaaggcgtcccaaggatcagaagggcatccccaaaaatgggaagcgcgtcccaaggatgagaggggcgtcccaaggatgggaaggacatcccaaggaagggaggggtgtcacaaggatatgaagggcatgtcattccaagcagtaaaatggcagaagcaaagaggcatggatagagaggaaagggctttgagggagagtgagccaggcaggcttgccggacacaggtggagttccatgagagagggtgagacatccaaggcacagctggctagaacaaattctcatcactgtccaacatcatggcctaagaaaatgcaactcaatgtactgcaaatacaaaattggtgcatgtaaaaggaacctcgtgatcacaggtgtagtacactcccccagagaggccagggggttgccagtacctataggtctccctcacccagtaggacttggccaagctattgttgacagtgaatttttacagccactgctataaaaccttcagccttaactaccttgctctgctatggctggcaaccccagggtaccactaatgctgccctattagcgtccaaagcattctgtgcaattctgagaacaagccctgattaccaaggcccccaggatgccatgggaatcgccaaggatacactgtggcctctgaacagcagaggcttcggagcgtgggagtggccctgctgccatctcccaggtcccatggcagcctcacctgcaatcccttccaggaagcatgtcccctatgggagggtccaggctagagaaaggacacggactggatatggaggtgtagaccccaaagagccttggaatgactgtcctggaagcagatccttggacctgaaatccgggtccagagatggacacagaagagtgaaggaatttcatccacaggtactgttagccgaggtttaggaacccataaagagacctgtaaagtcttcagtggaatttatccaaaaaaactcttaagtggaatccattggcaccaaagttccaggaccaatcccagttattcattttcttatttactcaacaaacatatactaagcatccaccccatcacaggcactgggctgggtcccagagacagacaggcagaaagctgacagtccctgcactcaagaagccgtaagttcagtgggggagagagggtccccagctggtgtggagagtggagggcaatagttctacccttcagggctgcgggcataggactgtttatatcacaggtcagtttcctccaggatatcaaggtgtccttcatttttaccagtgctggagtcagttctccctgagagaggcaggtgctgtgggggagggaggagaccatctctacctgggcgtgaatcctgctcctcccttatgagcttggtgacactaggtaaacccttgactttcttatgccccagtttcctcacgtgtaaaatagcaatgatgattgtctgtggtcagcagaatgacacctccatagaagtccatgccctgatccctggaacctgtgaatacgttctgttatgtggcaaagatggaattaaggttgctaatcagatgatttaagatagggagactatcctgaattctgagtgggaccagtgtaacatgagggtcctgaaatgcagaagaggacggcagaaggggagtgagtgtcagaacgacgtggcaggagagcaggcagcttctaaaaactgcaaaaggcaagaagatgggttctcctccagggtcttgagccctatggacatctttttttttttttttttgagatggagtctcgctctgtcacccaggctggagtgcaatggtgcgatctcagctcactgcaacatccacctccctggttcaagcaattcccctgcctcaacctcccgagtagctgggattacaggcacacaccaccatacctggctaatgttttgtgtgtatttttagtagagatggggtttcaccatgttgggcagactggtctcaaactcctgacttcaggcaatctgcccgcctcggcctcccaaagtgctgggattacaggcgtgagccaccacacccagcttgaacatcttgattttagcccagtgaggctcattttggacctctgacctcccaaactgtaagataacaaatttgtattgttttgagccaccacatttggggtcattttgttacagcatcccagaagctcacacaccacagtggtccctacctcccagggttgtgacaattaatgactcggtgacacacagcaaacagaggagtgtgattatttggggagctgggaggacatggttctgcagaccaggcctgggttgggggctcctactggagacagcatgaaggtcccggagcccttggcacagaggacactcaggtcaaagggtcaggggcagggattggggttgggccaacagtgtgagaggctgagttagctggagcacctcaggcagggaaggtggactcagcttatccacccagccattcgcgccagcccaacctgaggcacagtctaggccgaccccacttcccattcgaagcttcatccctgggttgtcacaggttgcctgagctccagccctcacttctctctctgcccagtgtctctaaggcaccccaaagtcactctgtcccagaccaagctccccacatcaccatctcaggcttcctctccagcgtggtctccttctggaaggggcaccccttgtcggccgggtcagggacccaggagccatccccacccctcccttcccctcggcatcctcactggttcctcctgggccctgccagttctagctctttcctctggtgttcttccacatctctccatccctattgctgcacgtctggcctgagctcctgccacctctgcctgccccttcaagagcctctcactcatcctccgcagtctccccaggctcttctcatcaccgcagtcacagatccaagtgatcatctcaagattaaatcctaccaggctttgggaatagagaccatgtttcttatcagggcccgaggggtcaggcctctgctgccctctgcaactttatggggcactgctttccagaatcttcctcatgctcttgcctatcacacagccctttggcagcaccctgcatcctcttactcaggcttctcgcacggtgctccccctccctgaagagtctccccgaccctcactgactgagctcacgtagcgcttctcaggaagctgtgatgggctgaattgccctacccaccccagaatccagatgttgaagtcctaacccctgcacctcagcatgcagcagtgtttgcagatagggtctttgcagaggtcactgaggtaaaatgaggtcagtaggatgggccctaatccaatatgactgatgtctttataagaagagattagaggctggacgcggtggctcacgcctgtaatcccagcactttgggaggccaaggcaggtggatcacctgaggtcgggagttcaagaccagcctggccaacatggtgaaaccccatctctactaaaaacacaaaaattagctgggggttggtgaagggcacctgtaatcccagctactagggaggctgaggcacaaaaactgcttggacctgggaggtggaggtggcagtgagctgagatcgcaccactgcattccagcctgggggacaagagcgaaaccccgtctcaaaaagaaaaaagaaaaaaaaaaaaaagagaggttaggatgcagacacacagagggaagatgatgtgaagatggccatctatgatcaaagagagacacctcagaagaaagcgacctgaagacaccttggtcttggacttccagcctccaggactgcggaacaattcatttctgttatggccatcctagcaaatgaaaacagacgccttccctgccccctcacctgcagtgggttctcctttctgttagacactcccgcctgcctcattcctctccctcttggcacataccaacgtgtaattacacagcctctgccaggctgcaaagccccctcttttcccacagatgctctgaggacatggtttgctttccaggccaaaatctgttataaccactccctggtgttagcacccctttccatggggcccccagctctgtactgtaccctgagtaaggctgttgccccctcgcagggacagccttcctgaccagcactggcttctccggaacaccggggctcacgccgacccagggccagcttcatgggcatgagatccatgtggtcacacagggccccaagctcagagggacccgtgcttggtttaatgttttgctgttgccatcttgaaattcttaatgccttcatctttgaacttgtgctttgtaagtgaagtggaacaatggcacatatgtgtaagcggaggagctacacaaagaaggaaaaaggttggtattttagtacaggctgagtatcctgtatgtaaaaggcttgggacccaaagcgttttggatttgcgatttttttcagattttgaaatatttgcgttatatacttaccactgaacatcccaaataggaaaatccaaaatctgaaaattgtgagcactgacatgacattcaaaggaaacgctcattggagcattttgaatttttgagtcagggtcttgctctctcatccaggctggagtgcagtggtatgaatactgctcactgcagcctcgaactcctgggctcaagtgtctcagccttccaagtcactgggaccacatgcccagctaatttttgtattttttggttttttttttcagagatagggtctcatcatgttgctcaggtgggtctccaactcctgagctcaagtgatccacccaccttggcctccccaaagtgctgggattaccagtgtgagccactgcgctcagcactttttgaattttagattttcagatttggggtgctcaatctgtacctttaacagcacttttgctggtctttcaaacacagactccccaagttcactttacactgggccctgcaaactaggtagccagtcccatgcccaaagtaggaaacgctccaggtcagctccccttaaactggtcctaaggctagtctcttcctcattagtttcttgggccttccacaggaaactctgcacccactctcacatatcatctttgttctggcacacagagaatctgggtctggggtccacataccagccccgcctgccccagcttggctgtgataagcgcaccttcaaggcttagaggcttttaggccctgacagcagtgggcgctgagctgtgacctctctctgcaggactgacagctattcatcagttggtgctcgctggaccagctgctgcccacccctgcatctttgcccatggcaggaggcaacactctcggaatgccagccttgcccagggcttttctcaaaggacacctcggggaggcagcccctcttctgcagcctgtctgcacctgacgcagggcctatttcagacagcccaggtcacccccagggcaatgagccccgagtgggccaggagtgggggatggtgttatttggggagggggcagacagccattggcagagccacctgagggtggtgtggcctatttaggagggactcacagcccacactatccctcaggggtcaggataggagcccttgtgagaactctgtctggagcctgggctctctcctgcatctttctacctcacccagggtgagacttgggactgggatgggatagggtgtggagaggccctctcgtatcttacttggtgccccactttgggctgagcaggggacagtgtctgatctatggcaggaagagaagagacaaggtagtgagtagggtacacactgcacaggcccgagcatttgggggcgctcaccacgcaggcatcagcatttgggggcacacaccacgcaggcatcagcatttgggggcgcacaccacgcaggcatcagcatttgggggcgcacaccacgcaggcatcagcatttgggggcgcacaccacgcaggcatcagcatttgggggcgcacaccacgcaggcatcagcatttgggggtgcacaccatgcaggcatcagcatttgggggtgcacaccacgcaggcatcagcttttgggggtacacactgtgcaggcacgaacactttgcctttttttcatgctggcaacagctggtgctgactctcagagcctgtggctgtgacaattatcaaaatgtttactatgtgtcactattaataatgtagaagccccgctagcctgccagtcagaaagagagagagtgatagccgaggggccaggctcccggaaggctcctgctcgctgcctgttcacccttgaccctgctgggcagcctggatgtagggagaggctgtgtcctgaatggtgccttcatctgctcttcttagccagcacccccagaaaggaacagaaccccttctcctcctgggtaccccccttcagcccttcagatatagggtctagatctgtccatccaagaagccttctggaagattctgtgctcccccacagcattgcactctcacttctgtgtgcagaagcgtggtggtcaggactcacgtctcgtcagcctccctgcaacgcccctctctgtgagctctttggggctgagacattcttccccgctagcttcctttacaaccctctaacgtggcaagtgccctcctgcctgccccagggcctttacacagcccgcctcctctcccaggacactcaccccctgcctctttgcataccaactcctatgcatcctttaggggtcagttgaaatgtcacctcctttgggaagccctactggaccgctcaactaggtcacagatcccctgttcaatattttcacagaatccttgccttatgggaccaatcactgtagtaatgaaagtttttaatcgaatgtctgtctctccctgtagtctgcatgctccctgacagcagaccgtggtttcttgcccactgctatcttcttagcatacagcagttaataaatatccatggatgaaggcatgaatgccaggaacaagccctgactcctgtagactctaacctcccatcttctctcccactcgggtgagcactttgggctgctgggggtctgctacgagggtggaattctcccttctggaacagtccctgcatctcgtgatgcatcccatctctattctaaggcatggccagctccccaccaaataaagagaaaggagggctctcaacaaccgcctctcacccactgagccactgcccccaaacctcaagaactaggatgaaaagttagaagggccaccctgtgcggtgtgccctggctgtgatgacagtccccggccctcaccctgttcacaaaccagcgaacacttgggcttgcatggacactgcctggagggaagatgcagggccaagagtgcttcaggctcagggtgagcacacgggtggtgggctgggggcagggagagtgccaggctgcctgcccccaggatcaaaggccctgagctccagatgaagggtccaggggctgaaattttatgcctggctctgccactgacttacagagtgagcttgggcagagggtggtagtgacttctgagcctcagtttcctcaactgtcaaatccaccagggatcagtgtcccattgacatgcagattttgacttccgatgataggaccctggccacggagcccacctggaatggtttccttagcagaggaaacttggggttgtgggatgtcggctcttggcaagacatcactcaaagctcacaaggccttctctagcagtacggacggagaggggagagcatgcctccagctccctgcccagtgggcacccaggcaggcaaaacacctcccagctgtgtcctgcacactggccaaccgagagagctgggcagttggcctggccgccgggacctcgcctgctctgcacaccttctcccagtgctaggatgaagtggctggcaggccctagcatggggctgggagtgagggtctcactgggctggccggtgctacaggggtgggaagctgccttggcggccccacctagcaccagcttttccaataaggttgttgctgtcggtagaaaagggctgggtgagggtcaccctctcagtgctttccagacctgagcgccctgatgcccgggtataggatgtctcccttctccccaaagagggaaacagtcagctccgagggcgggactgtgccacctccgccttgccctgctctccgactgtaggaggctttggagagagtcagcccctagcacgtacccagggagcaccttctgggaccagtgctggatcaaaggccctgagctccagatgaagagtccaggggctgaaattgtattcctggctctgccactgacttacagagtgagcttgggcagagggtgatagtgacttctgagcctgagtttcctcaactgtcaaatgggagggtcaggctccgcatcttaatggggtctcccagctgtgcttctcccccttctgcctgtgtccctgcagggttcccctgcctctcctgccaccacatccctggccctcgagtctctacaggagaagaggagtgattcagaacaggaagacgctcaggtcgaagcccgttgatttgttacaggtgacggatgctgatggccgttcatctgtggttgctgctgattagaaatcagtctccagtggaagattaaaggctgggggcagagtagggtccacacactgctcagggcttggtcctgctctctgccatggggaagtcagggggcagtgcccagcacacacaacagtgcccagcctcactgaggctgctcagacacccagcggggaaagtggtgctgatcctgttggggatgtgaggaattgaagctcagagaagttaagtaacttgcccagggccacacagctggaggcagagctgggatttgaacccagaactgtctcagaatgcactctgtttcccctatgccatgcgcttctcgtagtgggtggcagagtctagggcgatgagaagtctggagcctgtgcaaggccaggcttttctctgccatggagtggtgtgccacggataacacaggagctctttctgggcctcagttttactctctcttgtgagcaggaatcccccggagggggtgttaaaacatagactcctgagccttccccagatactctgttcgggttggtcctgagtaggtgctgcgggtctgtgggccacactctgaatagcacctactaactagcaagtctcttgggttccttttggcaaaaatcccccatctccatggccaggcggggaaatactggctaaaaccctgtggtgttcctgtcctcaccacccaccatcctccctcaggcctgactaccccctacactcagaagccacacacctttgagtccagggggagcccccaaccccacactgtgaatgcagctctctgtgtgagccaacagagggtggtagtgaccagaagggacttaggagccagcactgtgatttgaaaatgagcttttccacttcctgtgtgaccctgggaaagtaactagacccctctgagctccaatttccacgtctctaacataaagactggaaagacatacagaattgaatgtcattaaacggcacaccaagcgcatccatacatatgtgtgtcctaggaaatatatatataggatgtactcggaaagggacaagaaacggacagttggaacttcagtgggaagtgaagatcctttggggatgtatgcattcttactgcatgcttgtgttattcttccaaaaatgttctaccagcctcatgggctattgtagggctaatggaggtgatccctacaaagggttgtgcataaggcctggcatatagcaagcactggataaggtgttagctctcctcctcttcctccttctccccaccatgcctctcctgctggctagctctccctgccctcctgccattctcctggatggcactgcctccctccctcctgttgctctttatttatttatattctcttcaaaaggaaggggtgtgtgtggctggatcaattcatccatgtcgctcacttggctccacttccctcctccttccgcccctctccccctcgctgagaccaagagcgtaaattccttctggctattaattaaaagcagcctctcccttcgcgccagtgtactcgccataaattaatagcggtcttcttaatcaaatcttatctcctcctcgagccataaacatatggagctcaagttggtatctctgtgcacccagccgtgaaatttaatttctgatgcttcggtggactgcagggggtgggtgggtggtcttgtgttgggggccacccaaacttgagtcccagaaccagacccctggtcgaccagctgggttgactcaaccacctcccatgacgtctgcaggcaaagcatgtgtgactctttaagcctgaaggtccagcagtttcgttgcatgattataatcgttggcattctaaaggctttcagagattttatctcatccgattctcatgcaagctctatgaggaggaataggttgggaatatgagccccattttagagatggaaaaactaagtctaacatgttctttagagtcagatctgaatggaattcctcctctgctgctttctagctgccactctgaccctcagtttcctcatctgtccaaggggaaagagaatgcctcttgcagctttgaagtgcgaatgggattaactgtcatatgtaaagggctcggtatggtgcctggcctgtggctgctgcacagggtagagatattccactaagtgacctgcccaagactatccacccagctacaaatcggcagtctgggccataggcttcaactcaaattccatgcccttggaattccatctccaggctctagagcctgaggtccccaggctaggtcccctaggcaaaatcagctcagctgccccctccttctggcctgtcaaatgcccaccccaagtacatgtccataagccactggcccgaggtggagccaggagcctggacgggccagggcagagcctggacagaggacacaactgccagccttgctccagctgccaagtaactttgagccaataccaactggggcgccctctggcacgcctctgtccctgggtcactccagcatcaccaccctacttagcagctgacagtctccagcaatttccctttggccgcagggtggctcgggccatctctgcacgttatctgtgttactggggcgtgactcatgtcatcctggtgcaggctcattcataaatgagacgggactctgaggccacttctggagctgctttgcccattcagagccgagctccgcagcctctcctgactcttccagccccgggggacaatcaccttcctatctgagacccagcgctctggcaaacagccctctttgtgcccatcaaaccctcaggcccgcttctctggatctggctcattacatttccctgaactggcttctcctttcctaaccacacaggtgcttttaaagtcttctcattgctttgtgagtctgtttttgtttttctgtaaaatcttgaagtctgtttacaattcttcacaccctcagggaggcatctctctaagaaactccctgtcctgttatctgctcttggcatcccattagccactcacttcaccatctctaaagcccaccatgttcataagactctagtccagtggttttcaaagtgaggggaggagggagtcccaggaacagctgaaacagcagcacctggaagcttgtaagaaatgcaaattctggcctggcgcggtggctcacgcctgtaatcccagcactttgggaggccgagcctggtggatcacctggggtcaggagttcgagaccagcctgaccaacatggagagacccccccccctcccccgccatctctactaaaaatacaaacttagctgggcctggggctgcatgcctataatctcagctactcgggagggggaggcagaagaatcatttgaatccgggaggtggaggttgcggtgagccgagatcgcgcctttgcacaccagcctgggcaacaagggcgaaactccatctcaaaaaaaaaaaaaaaaaaaaaaaaagaaagaaatgcaaattctgggccttgtctcaggcctgatgaatcagaaattctgggtgtggagcttggcagtttgtgactgagcaagtatcccaggtgattctgatgcacagtgaagtttgagaaccagtgctctaggctgctggttctcatcagggccaactcaactttgccccccaggggacatctggaagcatttttggtcgtcacaactggcatctagtgggtagaggccagggatcctatgaaataccccgcagtgctcaggacagcctcctgcggtgctcaggacagcctcccctctaagaacaatctggcccaaagtgtcagtagtgcggagactgggaagtctcgctgtgcctagggccggggcggcacagttccagggccaatgcacaagcacagcagctctgggtgacaaccggacaggcgtggggcacactcctctacgtggcgcaggtgccatacgcacttcattcctgatggctcactttacagaaggcgccagatgcctgaagcacagagaagccactaatccgtgatctcacagctggtgagcaccagggcagggttagggccccagagcaagtgaagccagagccggggtcctccctgtgatgccacgtacttgaccttgcatggagagaggcttggttcttactaaatgatctgttcgagcaagaaagacaaactgcaggcatcacagtccctgactcactcagtctagtcagtggctactgtatgctcctccctaagccaattattctactgtgtgctggagtagtcccaggatgcaagaaattcacgctccagctcacagtgatgaatgcacgtgagtgcaggtgcacacacaaacacacaaccctgaagggcaaggagatgtctcttctagtccctcccaaggtgcagagttgtaggtgctcaaagcattcagaaaaatagaatgggaatgagggtgaccctgttggggagctgggtattgaggtgtggggcagatttgcagagctgggaaaagaggccggaaaaccacaggcaagggacgtggccttggagttggacagatgtggctctgaattctgctccaccacttccagcagcgtgaagcttggccaagctgcttactccacaagcctccatttcccaatctgcaaaatggggacattgctactggctccgcagccttaggcaggataaaaggggaagctcagacaggcactctgcgtcactctgtcctatgtcagcatcagctggccctgaccaaggataatgctgatctggtcaccacaggctggaacccaaagtggggtgtgaaatcggacaaggcagacaagagagcaataagcctcatccccaggcagcaggaggcaagccgcacatttggttttgagcagccccgcagagccactgcggattagcaggtgttacagaggtgctgagtgccattagcacctaattacgcctttgtccttgctgtaatcaggtgaacagagaagggactgaaaaggggagcgccttaaagagaaagcaagcagctgtcaggcaggaatctcttccaatgtgtccactcctctctagaatgtggcctccttcccacggccagagggcctgggccattcaggtggccagaaaggatacagccagttacagactcttacatgctgcctcttaaacccacacggaatcgaagtctgggctcatcaggaaacagggagccgatgagggcctttgagaagggggaggcaattgacgaaagaagacatttagcaagacgagaattggacggctgtctgcagggtggatggaaaggtacggctggaccagaggggtcagttcggaatctgttactgtaatccaggcatgtgctaatgcagaggagtaccaggaacacatgagacttgacaggacctggcaaccagcacctccttccccggcattcgcttcccctgtcggagatgatgctggaaagctcaaaggtcccacaagaagcacagcagcaacttgaagctgactttgctcgttgccaagacccgcaccacctgctgtgcaacaccattgctctgccccgtctggctctgggctgctccttcagaccctggcctaagtagtctttaacagggcacacctggggaaaatacaggttagtgactctaagtcttcaacacaccctgagaatgaccctgggtggcagacgcacctgattgtgtgttctgaggtggggaatctgggcatggccaacccggagagtcactccttgtctatgagaaacatccgagccctgggcccatccagaacatgggctgtgcatggaattgaggccctgagttttgggttaactgaaggttgccaggtagaggttgttaagggtagagtgttaagtggccatgctatgtaaactggtatgccctttccaaatggttgctgttttcctgcccagactgccaccaccggactgtaggaaggcggacatcttatccagctagctgtcattgaactatttatttgtttatgtttatttatttatttttgggacagagtttcgctcttgttgcccaggctggggtgcagttgcatgatctcggctcactgcaacctccacctcccaggttcaagtgattctcctgcctcagcctcctgagtagctgggactacaggcgcctgccactacacctggctaatttttgtacttttagtagagacagggtttcgccatgttggccaggctggtctcaaactcctgacctctggtgatccacctgccttggcctcccaaagtttggattacaggtgtgagccaccgcacccggtcttaactgtttctatatgtaaggcatttctcctgtccagacagctgccactggaccctcccctggatgtaagcccctaataaaaccctatgtctcctttgctggcgccgggtctcttcttcagcttctcgaacctggtgccttccctattgaggttaacagggtttcagcacaacacctgccctgagctctctgctcccccggccaccagcacactcttccgggacgccacagtggggttgccagatttagcaaaaacacaaacacaggatgttcggttacacttgaacttcccttcagacccaaggctgttagagttggggtttgcaacagtgcaaacctgtaggacgtgtagaatactctcgcaaattggggaatgctggtgctcaaagatgaagcaatgtttatctgaggtccaaatttacttgggtatcctgtctcttatctggcaccctatctacttggagatgcaggtttacaagaactaggacatggcatggcgaaaggtatgagaggacacaaggagacctggtccccatccagcaccccctactcatgcaggcacatgactgagctttgcggagatgcttatctgtggggtggggcaataccagagggcagccatcacgcggctgtcaggaagcctcctcatcttcaaagagcatcaagcactaaaacggtaagagtggccaggtctggagtgcagcggagactcgaggagagataaaaggctgccaagagcacacccagcctctctggggacgtggggtacgtgctatgaatgcaccttgcagtttctcacccacatgaggggggagttgatctctgcggtccccttcagcttaaaaacctcatgctgatcccaggcttccggacttcatctgtcaataacgatgaatgcagggaactgcagcctgtctaccagtagcccttgcaccacagaaaaaggaaggtaaatccacaactggaagaaagcatcatgggctgcaggccacagccatgcctccgtgggcctggcactgtacacttcttggaaagatctaggcctctcggcccccatcatgccgaaattagaggctggctccgtgtggctgcattgcacctgccagcagggttacacctgtatgatcagaaatgtgtaagagcagattttactggactaataaaaattaaaatgaccaaaatggagtcagaacccagccaaagagggagtgtgggagggaaagagtctccagctttttattttttaagcaggccaaccacatggaggtggggacgacttcttccccatgcccccggcagcacctccagccatctgtccccaccacctcctggcctggttagctggcttccagaaatgtgactgtctggagtctaaccggggcacaccaggagctgtcaccctgagtcaagcctggggcatgaagacaggaagagagggccggggaagcgcgaggacagggaccttggtggctggctgaggatgctcagatgacgggaagacggaacagtcaggcacaccctggcggctccccatttccggaaggaggacaggaacggaggtccagggagagcctattgtaaccaccgtgcgtgacaccaagagctttggggaatctacggaatcaaagagtcacagacacatggcctggccacatgcccgtctcccaagcatatttcagggtttaacctcagctcaccccggtaatgctgtgtttgcagcgcatgggggtgtccgtagctcgccggtgtcacaggatcaccccagagtggtgtgggacgtacacttggagttcagccggtccagccagctcattccccattcgaggcccagggagggttgggtgggggggattgtttctaagcttaccgcgcaaatgccgtccctcctcctcctccccaccccagctcctgctgcaggtcttccctcgacaggctgggtaccccaccccaccctctgcctacgtctgtgccactggggggctgtgttcagtgtggatgtggggctctgtggtccttctgtcatccctggatccagagttactcctgggggcccagacacctctgtaattcaagttgctgggctactgtgaggcccaaaacgtttgtggggagcagagaatgaaggagcctcagcacccactccctatcctggccacaagagcatccttcctcctcattgtgcaggaaacccccacccaaaggaacagagatggggtgtggggggcttcccccagagaccatgaggcatgcgctctgggccctggggtaacctggacaacatttgcctctaagggaccaggagtggcccaggacaatagacccagaggcagaacacctagcttggaagggccagagccccccagggaaggagcagatggtacctcaagctgaaccccttctctgcagtgcccccccaaagtgtgccactcacatgtttactgatcagatttggggtttctgacatgcagtaatcggatcacggaaggtgttaactggattaggcagaaggcttccaggagacaccagctgaaagtggctattaaataacacaggggcctgggcggcagggctgaggggaccctgcttcctcagccctcttcttcttttgtccctggctcctcacttaccctccttggccatatctcactgtccgtccttctttgagcactggccatgtggccgagtctgtgttggacaatttggttgcattatctcctttaatccccacagggaatttacaaggtaggtttcaacctccccatgtaacagaagggaaaacagaggcttggaggttaagaaaatggccccacaacccacagcaataaatatgtctggaattccaatccagctttatctaatatcgtttccaactcaaaaactgtttccccaaacctggtcatgtcaggcctcccaacgtctgggagccagcaggtggttcactctggccagcctctgaggctgagtgttggacagcgggaaggcggcattgatggggattcgtgggctgtaggggaaggtcagccactggacagctccctcgacccttgaccccctcaggctggggtgctggccttcccccgggcagcagctgagggcctgagtctcatgtcctcagactgctccagatcagatggtctcaagcccttctcctgagtataaagatgcccttccctcccccagtgctgctccctaagaccctagaggcaagaacttggttgctcccctggaaagtgttggtggtggggatgaggagatgggaagagagggagggggagagagagagagagaatatattagatatcacagaagcaagctggagtcccagcaatgtgcttgctcctgcaagactccctgcctgcctcatgatgggacaatgaacacacacacacacaacacatacaaatacacacagaacacacagaaatacacccatagcacacatatgcacacatacatgtaatacatagcacacatatgcacacaaatacatgcacaaatacaaatacatgcagcacagatgcacacaaatacacttagcacatatgcacacacacaaatatacagcacatatccacacacaaatacacacagcacacagacacacatacaaatgcacacatagcacacacatgcacacatgcaaatacacacagcacatacatagcacacacctgcacatatacaaatacacacagcacacacctgcacacagcacacgtgcacacacacatacaacaggcctcactacctgcctgcttcactcccccagcccttgtcaccctctgctctgtggatcacctcctcaatcagaacgccatcaccacgagaaaagacttcggcctgtttctgttgtttctacctctgtacccacagctcctagcacggtgcctgaaataagtgggcattgggtgggcacttgctgaataagtgaagccatgagccacagaaggggtgtcagtgagaattcgagtgtgggtgaaggtgaggaggaggaggaggaggagggaggaaagggaggtctgagagatggggagaggcaggcctgggggagagcgtggccctgtgtcggagagacagagaaatagagtcggggtggccacaggtaatgaatgccgtttgtggtgagactctcttgccctatggctccagattgagggggtgtcccaaggatgtctgggcacaatattggtgtgtgccagggcctgggaaggaggcccttgtgcttccaagagatcccacacagcaccagcctcccacacagccatgagtctgggccctggaggggacccagcctcgggtcatcagaggaaacgctgtctcctcctcgcttggactggccagtggcacaggctccctcctagggaggtatggagtcaccagaaaggcagcctggggcccaggccaggcccagatggccccagctgttcaccacagccccagggcaggcaggaagctggggtgcggggagtagccgctgacccactgggaaccagcatgcagtttggaggggggcctggtgggggcagtgtcagttcaaggctggcatccactcctcaccggcaggccctggcaagggcctatcctccctagaaggcttggaggcagccaggggggctgagaggggccaggggagctgggaggacaggctccatcctgtggggctccctgctgcctagaagcagccatcaagcagcccgagagtgtggcagacatggcttaggcggcctgatggagaagcccttgacacataggattgcagaagtcagaggtcttggccttagggggatacagtgaggcctcggcactcccagtcttatgtcccaggcagacggccctcacctaccccctgtgcctgccccaacacgtttgggctgtcctgggcagggatgcacacacagggagtcccagctgcaggtggtggtagcctggagacctgggtcctgggcagctttgggacagagccactgggcaatctggggcggcaggggtagtggagagggacccgcagggtgagtggggaggcagtggcgacctctatgagagaaggcagcctggcatatggggcagtgatcagggcaaggtgtcaacacacctgggtccccactccaactggggacctggaggaagcctcctcccctccctggagaggggcatgacacggtatgaacattggccggagctccagtcaacctctgcgaccctcagtttcctcatctgcataatgggtttgtgtgaatgtacgaaaactcctatcagtgcattttacttctcaatatatttctgcatatacatattctgcattctctctggcctccctgtcccagcgtcccagcctctgaaagggggcgctggctcatgatgtatctgtttcccgcagtgacatgtccccggaacccacagccaacccccttcccagtggtctctgatgttccccccacccccagaagggagatgaggaggagcagaaacaggggacacaggacagggtggctggttccagcctccccgaccctcccagctccactctgatcttgtggcctctccagctctcatcctccctccatggcctccagatgacaagtccctggggatagctccctgccatggctggcggtgtctgagcaaaagagggagatgaagctggcttggaatgggaggtgctaaccttgtcttcggagttgcccgcttgctccctccacccctagtccaggatgcgcaggcagaaccccggccatttccattctggggactctggtcgggagtccggcgccctaggaatcgtctcctcacttcagtctgaacctgctccatgcccagggaccgggccagtgcacctggactcacctcatctgaatcatccctgtgggagtgcctgtcaagagccaagatgttcccaagctcatctgtctttctcttgtcctttaacacgtattctcctgatgggttttggatattttcattctccttcacctcaccggggccttgaagggtggagactctccctggtgctggctacccagcaccccactactgacacaagacggggagctgccctgggtggaagatgagaggatgcaatcagatttctggaagctgggcacaagaaacctgtgaccaagtctcagccctgccaggtatgaccctctgaccataggcaaattatttaacttctgtgatctcagttctataaagcaggggcctctcctgtgatactttgcttatagaactctgcgatgtggacgtatctgtctggaatagttcctgggctcgtgggagacacacaatcaacagaactatggacattaccgtcctgtctctcagggctcatggaacgacaggcttctgccgatcctgcccccagcccaccgctatccttataaatatgtattcataggagttttcactgtgtgcttctggactattttcttttcttttttttttttttgagacagagtctcgctctgtcgcccaggctggagtgcagtggcacgatctcagctcactgcaagctccgcctcccgggttcacgccattctcctgcctcagcctcccaagtagctgagactacaggcacccgccaccacgcccgggtaattttttgtatttttagtagagatggggtttcactgtgtcagccaggatggtttcgatctcctgacctcgtgatccgcccacctcagcctcccaaagtgctgggattacaggcctgagccaccgcgcctggcctatttcatttttatgatacccctacaaggtgaaatattccctttctacttctacagatgggaagagtgacgctcagagggtttgggtcactattctgaggttacatagccagctggtgtccgagttgttctcaggtgccccaaacctagaacttttccatcccatctccccagggggagggtgctaggatcccgtgccccaaccccagttaacagccaccctcccaccattcaccactgccatgactttggagccatctaagcatatacaggtgacaggagtaggccggacccacaggcagtttgctgggtttgggagactcggtgtggggcgtgagttcctagacgctaaccccctgtcctcctggctcaggtcgctgggtcattggccgacggcacctgtgcgggctcatgcagggcagctcagatggcacaggcctccctgacagccagctggccgaggcagccccatgcatcagccagttttgtttattctccagccttgtttatgactcgataaaatccataacacggacagtgcctgtctcccctggcttcccctctgcccggctctcgttccctggggatgcagctctgctctttatagaaaccacctgctaaactaggcccacctgaaacccatcactgtcagtaaatgaccctccaggagaggaagctgcccagtaagtgtgaggcagcgggcacgacgtggatcgctggcctttttctttacagaggttaaaaatagtcccaccgggagcagcccatccccctccagggaccacccctagctgtatacctatgtcccctccagcaggggaaggtgggagaggcactggacaggtgctgagaagacgtggtctggccagggcctggcacctgtgagctcgaaggcctcgtgtaagtcacagcacctctcctgctttccgtttccatttacacaataaaatgaatggatcaggcaccaagcgccggcttgcttcgatttttcttcaagtagtggaaccctttctttaagtaaaattttagacagatccccaatagatgagagtgctgaagaaaacggacttttccgggtaaggagcgagtggaaaatgtagcatccccctagaaagagttaccccttttcttgtttttccaactgaagtctccgagcttccagaaggctgaggctggatatttttcattgttgtgtcctgtgcaatgggcctggcccactgatgtgtctcttgtagtgcttagtacattcgtacagaaggaggaaggtaggtaggtaggagggagtgagaaaagaaaggagagaaggtgctgggcacggtggctcacgcctgtaatcccagcactttgggaggccgaagggggtggatcacttgaggtcaggagttcaagaccagcctggccaacatggcgaaaccccatctctaccaaaaatacaaaaattagcctggcgtggtggtgggcacctgtaatcccagttactcctcaggaggctgaggcaggagaatcacttgaacccaggaggcggaggctgcagtgagctgagatagcggcactgcactccagcctggatgacagtgaggttccatctcaaaaaaaaaaattaaattaaataaataaaaataaaggggagagggaaaagaggaggagagagggagcaaggaaggagggaggaaagggggaagaggaaaggatgaagaaggagggagggaggggaacacacattaagccagtttcttttttctctcacttcaagcatagctcaaaatccattccaccaccctaagccattcctctccatcctgagactcaggctaaaagcagaggctgtgccacagtccttgccaggcccaacctgttccccacttgcagggagctcagccagtggtctctgacacaggggcccaggctcctcagctgtgatggggggtccttcagtgaaggtaggtgccaagtcctgtctgccaacacagtcactctgtctcacacacctacggttatttgtcaaagtatgtgactgctgttgtgattaatacgctagacgtccatttaaaagtgatactgaacccgtagcagcccctcgtcactatgttttctcaaacagtggttgctaaataaacaaccacaagcacatggagatccctgactttcctggggaaaggggtccttgtgctggacaggaggggacctggtcccaggtggcctgagcccggggcagaccctcacccttccctggccattgcagctcccgccacttcctcggtcccatccagcagcactgggtttccctccaggagcccatggatggcagccgtgtgctgggccagaggccacatctggaattcattctcttcattaaattggtggctgtttcccaagctctggctctcttgatcctcccaaagccctgttcgtgctgctaacaagggcagtaatttgttcattaaaaacgggacgccttcccaacaggcctccctggcttctgcctcccctgggggaggcggggtgtggagagggcgacagcaatccttggtcccaggatcagagctgtcccacctagggggacacccagggcttctctggggcagagcctcacctgctctggtcactcagcccctagctccccaagtgactccgatggtgccagcagacagtgtggggagaggccgacaagagcccctgccagctcctctcctgctctgcgacagggtgttgtggccatccagtcgatgcggacaacttgatctggcatcaagtccctgtgcaaaccacagcccatcaagaggcatttattgttgtgaaaacaaacagtcccctccccagtgcctggtccatcctatctccactccccaccggataccctttccctgtccttggagcagctcagacggactaatccagagctgctcactcctctgcattccaatctctgctccggctggtctgggcccaccagggaacaggaggcaggataccagagtctggggggcaggactctgtgcacagaaacccacccaagagaggcctcagggcctttggtgcctttatgaatgatcttttcattttattatttaaaaaaaaatttttttttttttttgagatggcatctcactctgttgcccgggctggagtgcagtggcatgatctcagctcactgcaacctccgcctcccaggttcaaacaattctcctgtctcagcctcccgagtagctgggaatacaggcatgcaccaccacgcccagctaatttttgtatttttagtaaagacggggtttcaccatattggccaggctggtctcgaactcctgacctcaggtgatccacccgcctcggcctcccaaagtgctgggattacaggtgtgagccaccgcgcctggccttacgaatgatctaagtttaagcacatggaccctttgaggtggcatgctgggtggaatagtgtccccccaaattcatgtccacccagaacctcacgatgtggcctaatttggaaagaaggttgttgcatatgttctgaattacggtgaactctagtccaatatgctgtcctgtgaagagggaaatttagacacaggtacacgcacagagaaaagacgggatgaagcacagagacatagggatagggccgagggacaacggaggcagagactggagtgaggcatctctcggctaaggcatgtggagaatcaccagtagcgcccagagctaggagacggtcccgggacaagctctccttggagtctccagaaggaaccaaccctgccgacgacaccttgattttggacatccagactccagaactgtttttttttttcttttttgagacagagtcctgctttttcgcccaggctggagtgcagtggcgccattttggctcgttgcagcctccgcctcctgggttcaagtgattctcctgcctcaggctcccgagtagctgggattacaggcacccagcaccatgcccggctaatttttgtatctttagtagagatgggattttgccatgttggccaggctggtctcgaactcctcacctcaggtgatccgcctgccttggcctcccaaagtgctgggattacaggcgtgagccgccgcgcccagcccagaactgtgttttaaacaacccagtttgtagtgcttcgttgcggcagccacaggaaaccaatacaggtaggtaggtgagttggccacgtttgggaaactgaggcccagaagttggagtgcttcactccaaggtcacaaaaacaaggcagtgacacaactgaggctggagttgagatccccactcccactccatgaatcctctgtgaggcccagagactgagaaggagcccaggcctgcatgcctcagccactttgttaggaagaaagcgagggctgcgaggcctgggcagagcaaggacggggagcctcttcctccatggcatcctcagctgcacacacagacctgtaacagggccttggcaacagtgcaccatctctgactcagtatccaggattctctcattcttagcagagtgccggctgcctggcagacactaataaatgaatacatggatggaagaaaaaaaaagtctaagttcttttttttttttttaatgaagttcctttgcagaatcctccttttttgatgccagatagaaataaagttggatgacatttttcccattctcagtctcttaaatcccaagaaacccacacaaggaaatctatgttcgggtctgggcactgtccttaagtgagaatgttgatttaaagcagggtttctcaaccctggcgctattttgttgttgttgttgttgttgagatggagtctcactgtgtcactcaggctggagtgcagtggcgtgatctcggctcactgcaagctccacctcccaggtccaagtgattgtcgtgcctcagcttcccaagtagctgaaattacagggcctgccaccacgcctggctaatttttgtattttagtaaagacagggttttaccatattgatcaggctggtctcaaactcctgacctcaagtgatccacccacctcagcctcccaaagtgttgggattataggcatgagccactgtgcccagccaaccttgacactattgacagcttgggtgggatcattctttggtggaggatgacctgagacactcaccaccctcccaggttgtgacaaccaaaagtgtctgcagacagtgtcacatgtcccctggagggcaatgtcattccctgctgagaccaccttgtgctggccataggggtgcacaggtgaagagtctccaggtcccggcctcagagacctccctacttggtggagagtgaggggttagcagatcagtgtatctatcctggaagtgaccattgctgcctggccatgcgggcagaggctggccccctgcgctagagagagacttctgggccggactgagaggattcatactgaccgccaatgtcccttcccctagaagattcaaaaatgctctgggcatctatcacactgataagttggagagacgactcttttctcctctgaaatgtagctagcctgggtcccaaggtgatgcacacccaggggagcctaggatgctacaccaggcaggacgggcttcccagtgtgcagggagcttgggtccctgtagctcccactctcaactcagaatctataaacatggcagcagccacttacgcttcccagttctgtgccaggaacttttcagtgatccagttatagcttctccttaaagctacgctactagagaagacatattagccttgctttaaagacgaaaccaaggcttagagaggttaagaaagttgccaggggtcacacagcttgtgggtggcaaagctgggccttcaacctaggcctgtctggctccttctacaacacagatcctggcacacctggaaccttgtaaggatgtccccaacttgggacacttcctgggatcagaggtcagcggccacaatgagtgtcctcttagcagagccctggagaagaggtgtcataaagaggaggatggggagagagggggaagcgcagaacccaccaacgtcagctggcaggaggacaatgcctgtctcagaacccagggccaaatgggcagcagatcccctggagattgccacgcggagggaacgcccgcgccgggcagcgccagcgtcagccttcctggccaggagagtgtttatttccagggcgaggctaggagtggtttccaggtgggggtccgtggaaataacgtgctcacacacactctcttgagcgaacagagccccattcagcctgtccagaggagcggacccgcaaagctcatggcctgcattccgggcagggtggaaaaggcgattcagagaggaacgcccagtcagagccagctcctccaccacccccttgtccttcgcatcatctcccaggaggacaaaacaaactcagggcacagggaagggacctggcactcgggatacccctggtttgccagggaagtcaccagcccacaaaacacggcattgcaaccacacatgacactttacatccccaaaggccggtgggcagctggcttaaaggaacaaacagttgctctgggatctccactgccacctcctgttccttgccctgctgagccctgggactagagaggcaggatgacagccaggaggctgctgcaacagtccaggagaccttggtgacccagcatgaggagtgcggggctgaggggtgtggagagagaaaggatagcattagggtttcaggcctaagctagtgtgccaagtgggcctcacaacaggcatgtgggtatagaaatgaggaggctcagcttgggcggtggggctaagggaaggactggaagaccacgccgaggtccaggaggtctggagctcatcacagccattgcagcaggcgtggtgggcgaggatgccatcagcacagtgatggcaactaaagccacgtgggagggggttggggaacactggcacatatgcacatttagtggaccactgcgggagaggaagcccccagtggtcctggaaggagagttagagaggcaaccccagaaggctgcagtgttcctgaaagctgagaagaaaggagaggccaccactgggcaaggccaactatgggcaagggggcaaggccgtaagagggtccctctggtttaccaacatggagatcacaggcaactttgaccttgaagcttcgaaaaagggatgaggcctggggtgatgtgggcaggcaatgaggtgggggaaagagtgacggccccttcaagaggttgagtgaaggaaagatgtagggaagaggccggagcagtcaagagaaattgctaaggtttgagggacgtagcaggtcaggctgaggggaaagacttggcagagagagaggatggaggtccaggtgagggggcgggatccaggctcaggtggaggtccggccttgaccacaggaaatgggtgtggagaagaaagcacagggggtggaaaaagtcttgctagaaggaaggctggaatcccggagattctcacttgaggggttcttcatgtcttggagaaggcagttggggccttcagctaaggagaggagggagtggagagggtgggagagatggtaataatgacccataactcctgtgtcagattttcctgctctcctttcctgagtcagcccagcatcacctcctccaggaaggcctccttgttacctaatcctggatgagttccctgtcactcctccaaattcgggcaataccctggtgtgcctccatgcactgaccttggcaccgggatgacctgtttgggttcctcactaactatgagcatgtgccaagagatcggatgcacgtatacaacaccagccctttgtggcacgctcagcacgtaataagcgctcaaaatgcttgctgagtgactggcagatcggtagtcccttctctggactcagcctcctgctcttcaccaagcccgggaaagctgacaccccatttccctgactgcccagcaagaccacagcaaactgtagagtttggttttttccttcctgtgttttaaggaaaataagaaaaaaaaaaccccactcataccaaacaaacaaaatgagatggccttgttgacgtgctgatgggatctcactagcagagatggggctgtgttggttttcttttgcaaagattctatttattttgtagggtgcttggaggggcacaccatgcttgttgcttattattactttttgcttcacatcttgactagcacaatggactcatgatgaaaagaggctgacgttctcaggggcagcagcaggagcccagaagctggtgagaggcagctccctagggaagctgggctgggcaggagctccctggggaagctgggtggggcagggcccccctcccggaaagatggatggggcaggggctctgggtggtctgctgagcccctcctctgagggggggcagggcaggtgcttatgggtgctggggctggtgagtaaatgctggaaggggctttcaggaggtaagaaaacaacatcagctgccacctcctcagagcctggtatgggccgggtcctctcctattttacccgcaccatctgtaacccttacgacagccacgaaggcgggtttcaccgtttctactccacagatgaggctcaatgagttgtcataaatcgacaaacgtgctgtggctggtgaatggtgaaattaggttcaaacccaggtttggttccctgcagagcctgttttcttttggaaagtcacgatcgactctatccatggagaaaaagccactatccaccccatccacgcagaatccagattttcagttccgagaatggagaggggaagggaacaggctctattagtcacggaaacatattctccattctgggagtggtgacatagtgggtgagaaggggtgcagatcaggcggagggaaagcttcccatggcatgctgagtggagcagctcagtcaatgactgaaccagaagggtggttttccaggcttccaagatggaaaagcattggaatggcccaagagccaatgcttcttgagggtctccaatattcaagctagaccatgaggctggacaggcaagggagacagtcccttcctccctcattcattcctacccctttcatgagtggcctctttgtcccatgctccctgggagaaatgtgtcctcaagaagaggcaactactgattcaagtgccaaataagtggtgtggacaacaagtggtcaagaggacttcacaggatcctccagatctctaaggaggaagagaggagttgtcctcaccaccacagccttgctgagaagaggccctagcaggcagctgtagaaaagcacagctgagacgtccactctgatcaaccagtgcgattggcacatatcttagctgggacctggcctgagagcagggagaggcccacacgcactcatttcttcattcaactgtgtgtgtgtgttcagcacctgtcatgtaccaggccctcatccgggcatttgggatctaccgggggacccttaagacaaagattgctgcccctggggagctcatgaaaaaaagcaaaacgctgagccagggaaggggtctcgggtgggagagcaggtgtcaggagtaggctacggtgttcagtttgggaggtgggccagaccccactgaggaggtgacactgagccaaggagtcacctggggtgcagcattgagggcagccagatctgcacaccccaaggttttccagaaggggttgcagggcaggcttgggagacagaacagaggccacacggctggaaagcaacagagagtcggatctcggggacctcctaagcttctgtagaaaaggcttttactctgagggttttacgctgcaggcttttgagcgaaggacacatgctctgacttctgtgtgctttttttttttttggttgttgttaatattttatttcagaacagcttcagatgacagtccagttataaagatagaacaaagagtgtccacacaccccatcacccagttgccctttttgttaacatcttgcacactacggtacatttgtcacaaccaaggaaagaatgtgggtccatgaccaccaactacaccccacagtacacttggacttccctcgtctttccctaatgtccctttctgttcccggatcccatccagaatcccacattacgtttcaccgtcacttctccttgggccccttgggactgtgacagtttctcagatgtgcctggtgttggacgacctcaacagttttgaggggtgctggtcgggtcctttgtagactgtccctccctttatttttctctgatgtgtttctcatggttagactgagcttgtgggttttggggaggacgatcacggaggtaaagggcccttctcatcccatcgtgtcagggtgcctgctggcaacatgcctcgtcgctgactatgttaaccttgatcacctggggagacagggtttgctaccagcattctccactgcaaagttacttttaaaatttccttttattttgagagggagttttgcccttgtcacccaggctggagtgcaatggcgcgatctcggctcactgcaacctccacctcccgagttcaagcgattctcctgcctcagcctcccgagtagctgggattacaggcacccaccaccacgcccagataatttttttatttttagtagagatggggttttaccatgttggccaggttggtcttgaactcctgacctcaggtgatccacctgccttggcctcccaaagtgctgggattataggtgtgagccactgtgccaggcctaaaatttccctttttgtatggtactctcaggaagcagctgcactaacagcagcccacactcaagggaagggagatcatgtctatttttaaaggatcaccgtggctactgtctattgtgaggaggtgactgcagtggctcaggacaaagatgatggtggctggcaccgtgtcgcagcggagaaggatgatgagaagcaactgaactctacatatacgaatcaaatatcttccgttaatcagattcttctattggcttagatgtggggtgtaagagaaagagtcaagggttagccttgaggtttgggctgcagatcactgcatcttggcattgacctcagtaaagcctgggaaggccgctggaggaaagcctttttggggaagatcaggagtttgcaagaccttgtgtgtgttcagttgggatgacttggtcatcaaagtgaatgcagtgttggagagataagcctggagtgtgagagatgggtctgggctggagggaatacacatgggtatcgcaggcagaggttggatgagatcaccaaggggtgggtactcatggaaaggaggagagagcccagaactgagtccagaacgccctgacatcagaggctggaccaggaggaggagccagcaagaaaggcaccaaactgagagccagccaagagaagaccacgatggacctagtcgcagggctgagaaccagccccagcagagcagcttcagtggaagcccgactgggtttaagacagaaagggaagacaggaattagagacaggggcattagcaactttttcatgacattttgctgcaaagggagcaaagacatgcagtggaagctgacagggaaaacggctcaagagaaggtttgttttttcaagatgggagaaatcacaaagcatttctctgctaatgggaatgactttcaagggaggtaatgggtaccctcttacctacgtgcagtttacaagagttctccagggtctctccaaatcccaaaggagccaaagcacaggagggagggagggaactgctggggccaaagtgggaaagagaagttgcatgagaacctccagaaaacctcgagagcccccagggcccaaggagacagagtccctgctggccatgtccctcccattccagcaatcaacaggcagctgtcaggagacaaaaacagctcactggagcaagggctgggactggtagtaggtgcggagctcagccaggcagctgcacgggaaacaggtgtcctgctgaacaagatggaagcagggtcccccacaaatgcttgtgcagcccatcagccccacggagacatggggaagacaccccgtctttctcctccacgtccctggggagatgacactggtctcggggagacactaaaagcctaggatgctttggactcattgttctccagggatccccagtcagaggggctgaagctccctgaaagtataccctaaaagttgtgtgcccatgcacaggcatgtgactggggaggaaacccgtaggtttcatcagctcttcgaaggggactatatcctcaggagagatgcggaggcccagccagtcacttagggcaccccgaaatgcaccttttgccctgctccaagctcaaaagctgcttgccccatcccagacactgcagaaagggggaaaaaaatcaatcaactgaccattttgttctcagcctgaattttggcccagcacgcattccaagtggctgcaaatcccagtgacagcatgcatgacgcttggtatctgggtcactcactggggatctgactcacaggactgcttcactgcagccacaagacggccaggagagcccatggcattgctaatttcccccacagtagccacgagggaggcggggagtgagtatgtgtgcatgtttatgtgtgcaactggtgtttctgtgtgtgcatgtgttttctgtgtgtaaggcatgtgtgtaatgtgtgtctgtgtgtgttaggtgtgcccaggaaggatggagagggtgtgtgagcatatgtatctatatatgtgtgttcatgtatatatctatgcatttggtatgtgtacaagtggaggagtgtatgtgtggtgtgcgtgtgcgtgtgtgtgtgtgtgtgtgtatgagagacagagagatggagggtcaggcaggagtatggagaccaagagaacatgggggcctgtgccccccacctcccagttctcagaatgaacacaaggatctgtcagaaatgttatagaatgttctgaaggatgtgaagtcagctacaggtcttaatactgtattctctgcacagtctgaaattgcattttgctagaaatccaagtcatcgtgccctaggtcgtgctgcgattttgcaagagaccaggggctccgaggggttgtggtgccacgcaggctcacacagctctgagggtcaaagacttctggttctctcccaggagggggatttagaatctcactttctctccttttatcccactctctctctctctgcccccactgctgatggacaaagacccctcacccaagttcagcctctggctctgtcctctcctttcctggcactttctacagagaaccatgatgaagccagcgtcctctctctggcagggtcagggactgctctgaccagtgtggagcacgccccagggccactcagaggcctccaggaggccaggctatggcatagcaaggctggggcccgcctctgtggcccctccttgctggacgcccaagtccccctgggagaggtgccctggggggaccccaacaccttggctgggtgtgtgcttccctagttcccctgtggcctctgctcacatggtaagtggaatgagcacggcctcatggaggcctgagtttgagcctgtgacctgcagaggctttcccagcctcagtttccccaccttccctcatggccagtcatgctgcttcccagcaagttagggtgcagtgagagggtcccttgcccccaccccagctctgtaaggcctacccactccacgctcctcctattgggacccacgtccttgccagctttggagcaggcagtccagcccagcttctgcccggcccctgcccctgcagccaagctggagggagtcgccaccagagcccagggtcagatgaaagtatctcccggctctgggcttggacagaaactgatgcccaactctgcgtggggaaggggagaagcaggaccccaacgtgtgctgatggtcacagagactgtaagtaccacagacactttccctgtctcaggagggagcccacattacccatcagccgccagggaagtctccccacagtacagttgtgaattaaacatgtggcctaatgagttgattttattagtttgcaaacgcattgagaactcgttatgaaaataaacagcaattcctttcacccccgctgcagcctcttcaagcgaggaaagataaatgcaagtacaccacagtggtggcccagctgcacccgggctgcaggccggccccccacggtcccccaccctcacggggtccctgtgacccagctgcacctgggctgcaggctggccccgcatggtcccctaccctcatcgggtcactgtgacccagctgcacctgggctgcaggctggccccgcacagtccccaccctcaccgggtccctgtggcccagctgcacctaggctgcaggctggcctcccaaggtcccctaccctcactgggtccttgtggccctgccggggtgagggtagaagaggaggccaagggaagggagttctgcagccgacaagcccagggtggcagcctgagggtcccggcttccccattctgaccccttcagaacttgggggcggtggcaaaatgagaagcccagagagccaaataataataataatagtaacagtaggccaggcgaggtggctcacacctgtaatcccagcattttgggaagcccaggcgggcagatcacaaggtcaagactttgagacaagcctgaccaacatggtgaaaccccgtctctactaaaaatacaaaaattagctgtacctggtggtgcgcacctgtagtcccagctactcaggaggctgaggcaggacaatctcttgaacccaggaggcagaagttgcagtgagccaagatcgcgccattgcactccagcctgggtgacagagcgagactccgtctcaaataataataataataataatagtaatggtaataatagcagcctaccagatgtttagtatacaccaggctctgtgcgacatgctgtctgatctgccaccaaccctgtggggtgggaaacacggtcccattttatagatgaacaaacacaccaaggtcctgctcaagttgatgcgggaggaatgaggagcacaaagcggcacgagagattttcatttcaggagactttctcctgcagcgctaagtgaggcccgggttagagacagcaagactagttttccctgaaaaagatctccataatcctgtggctgggcagggggcaggaagatggacaagctgacctttggaggagccaaggggccctccacgactccaagccccgtctccctggagacgccaatgagcagccggctcacctcgctccctccccctctgctctccccacccccgccctccaggtccccctggccccaggcccctggagagagatggttccaggctggcggaattagccgtgaagccagcaggacaggcaccgtattgtcacgctctgccatccgtgctctctttggaaaggatgttctaatcccatttcatccgctttccatggctgtcagctgtttgcaggcatttgggaggcaggtttctgaaatcggagccactgtgcggccccacccccacccccacccccagccccctccccctacatatgctcatccatcagtcttgctggccggacccctttgttggccggccaacccccatccagtggcacgtagggcctcacgcccctcccagctgccccacctcttctattttgggtccacagcaggacaggcctgggatgcctcagccaagccccctgcgatgaggagggggacagggaagggggagccgtggagaggggcctctcagattccacagggaaggaattagccaagtgtcagctactttctgcaaatgaagagagagagaaggaggacctttgagcagtcaaaggaccagtgctccttaattcaatttatcttccacagtgcagccagagagatctagctattaaaacaaaaacaaaagaaaacaccactgctcctcacccctttggagtacgagatctggacaacagagtccagttttcccagactggcccactgggcctccctgccggcccctgcccttccccagccctcgctccctccccctcccctcccactgctgtacttcatactcagctgcttttcatttcccaagcatgccagggcccttgcagcctctaggcctttgccctggctgctcactcacttagcctggaaagtacccccaccttctgtggcaggcctggttcttgcctcgctttacagttaagtgcaggaaggggtctcgctcttccagaaagcttctcgaacccgaggatggaccacgtttcctgccctgcctcggtttcctaaaggacttgatgacacctctttcttagcccttgatttaaacatcatattggatttacctgcttatactcgtttccccctagatgactgtgagtcaggctagactggaggttggggaaacatgtcctgggcatgtttgaaagacactttgtatgttgggtacacagcgacacaaagatgggaacaaaagacactgggggacaaggattgaaaagggggagggagggaggggcataaggattgaaaaggcggagggagggaggagcacaaggattgaaaagggggagggagggggacaaagattgaaaagggggagggagggggacaaagtttgaaaagggggagggagggaggggcacaaggattgaaaagggggagggagggagggggacaaggattgaaaagggggagggagggagggggacaaggattgaaaaggggaaaggagggaggggcataaggattgaaaaggcggagggagggagggggacaaggattgaaaaactacctatcaggtactaggttccctttttgggtgacagcatggttagaagcgcaaacctcagcatcacacaatatatccaggtaacaaacccgcatgtgtgtcccctgaatagaagataaaaaaaaaaaaaaaaagaaagtttgtaaaggctgctcctaaactgatgtttgaatcgtgcctgacacagaagaaagtgctcagtaagtgtcagccacctctaggttattatttttctcattgtccttgtttttatttttcaactctttgaaccgtgcctgacacacaatgagtacatacttgatgttacaactgttgacttcagagtcttagatagatctagcaagaagataacctcaaacatcattgactttaacgttctgctgtcattgatgatgcatttgaggccccagaagtaaagtaagttgtcagaggcccctgaattggccactagcagagctgagtctagaactgggcctcctgatgtcccaacgaagtatgagtctctgcccggatgccctcctcaccataagccctagtcccagtggagctatatgctcctgagctgcaaagcaagtctctttctaggtttctctgcagagtccaggtctttgcataacacttagagaacatcagggataagacaggtccagtgttctgttcggctcaccaaaaagaagggagacacagaccttctccccaagccccgtccctccctccatccccagtcctgttcctgtccaccacacgtgaccccagggtctgatggtggttgcggtggaagttgttctggaataaaactctcagctaggtgatgcccagggtgaggatgtgggaagacagagtgatgcacaagctggtccgacagcccactggaggccacgtttttaaaccagagtcatgtgaaataagcaacacacacacacaagtatacatgcgcacaaatatatacacacatacataaacatatacacaaatacacatacacacaataacatacaacacatacacacaaccacatgtgcattcacacatacatatatgtacacacagtcacatacatatatacacaaatacacatgcatgtgacacacatgcctacacatgcacatgaacacacaacccaaatacacgtacacacgcatgcatgtagacacatatgcatatacacatgaacacacatacacacacgtacacacacatacatacttcttccctctgcatctgagcttgacagtgtgcatgaagtagacatatgatccagtttgtggaatcggtacctcctcttccccagaacatcaggaagcgaccagaaaggcaagccacttgcatgctaccttgcaaactgacctcagggcactgtgaaccttgtgctcggcagccccaggcatcccggtgctgcttgccttccccaccctctccccgcctgtctgagctagacaaatttccacccccggctccccacctcaacagtctccccagccccagctcagcatcccacacacacatgcaggctcaggaaggagaaaaaaacaagagggaaagaggcaagcaacggtgatttcctttcacttgggcaggctgaccgtggcctcaaggaccactgtcgcaatgcttaggcctgagcacgcatttgtctttgtttggtttgttgctttggtttgtttcgttctcctggctgaattaccacgtggcagcagatcctttttctggagtaatggaatcttagtcctgggtgtttggggctgagaaaatgaacgttccatgatgctataaacgaaggaagataagaaactaactagtccagctagtttttgcagaatgctgtgagagttacaggataggaagccactttcctcctgggcccagcccttagagaggtgcctgagaggtgagggaggtgctctcagagctgcaggcactgcactgtgcgcattcccaccatgagatgcctggggaaggggtcagattccagggctcagggacacagaagccccttctgaagtggggatagctgagaatgcagaggggagacaaagtgggcggagagacagctctcctagggagagcggaggtctagaaaaggtgctgggatgagagggcgggttttcacaggcccatgcatggcacatgggaggcccacgacacatgtttattgaatgaatgaaggaatggaaggccatagctgtgagcatgcttgtgggcaggggtggttgagagagctgacctcgcactgagcaaagaaggtgaagggctgtagaggggaagggagaggcctctggggaggggagaagcttcccgcagagaggaggggagagggctccaggggaggggaggggcctcctgcagagaggaggggagagggctcccgcagaggggaggggagaggcctcctgcagaggggaggtgagagggctccaggggaggggagaggcctcctgcagaggggaggggagaggcctcctgcggaggggaggggagagggcttcagggggttcttaggaggcaaagagtcaatgcttctctttctaggatggtttgaatgcagttttgctctaaggcaaggaaatgaacccagagacccccaggggcccttctggctcctggctctgatttttaacttcagccaaggtggggaggagggtgacaggcaacaaggcccttagagctgtcctctggctgcagagatctctccctgtccagcatacctagtcgacaggctccaggggagcttacgaagggggcgtcccagctatttgcgttctcctgagtgatttaccaaccccctgccaatacaactccatctcctggagaattaactggctctcctgaactcataaataattagtgagtctgtccctgatgccacttaacaatttgtgttttcaaagcactttatgcccattaactaaagaattcccaattcacctccagaaaaacaggacatcataagagggagcctgaaaaggcctctggaagtcatctcatccatcccccggcctctgggatatggtaaaactaaaacaaaacaaaatacccaacaaccctgttttgagaacacatcgagatctaaacgccttaaaacaaaacagaacaaagaaaaacaagatgtcaggagggcaagctgctgtctgacgagttaaccactagaccgaacccaccaggccaaggagccagggaggtcccatggagtgtgatgggccagggagagaagcctgttaaaggggagagaggtgcttaatttaataccaggcaaatgcaagagaccttgaaccaatagataggtttccttacctgcaggtagggaaatggtaatttgctaacccaaacccattcattagcctgtaaatgacgcagctcttatacctaggagtgtccctcttaattagaccccatacctttgcccagcctcattttatgttttgcttctggcttggggcagaaatggccgttcatgccaactggcctctccccatggagagggagagctcgctgtgcctgtggattcatttatagtcgtcaaaacaagattctccagggaggcagtggtcggccaagcccaagggctatggagccacaaggattcaaggaagcatcactcctttgcccttttagaatcatgacctcttaattaatcagcaaggaactataaaaaacctactgtatgcccaggacagtgtgagaaatgagagaggaaaaaggagtctccatttctgccccatgaacaggaagggtgtttccctttggaatctagagtccacgtggtgcccaagaacggcatgggggagtcagggaagcagaggccaagcaagactcttctacagggaaggtacttagacaggcaacttcctattccccgatcacccctgccatcctcacggccaaggaaagcaatgccaggaataaaggcgatggacaggtggagggtctgtgtctggcacagcagagcaaatgcctaccagagcacaaaacccacagctaacaactatgaaccctggacagaacaccaaaaaagcaactattagggctgggtgtggtggctcatgcctgtaatcccagcactttgggaggccaaggcgggtggatcacttgaggtcaggagtttgagactggcctggacaacatggcgaaacctcacctctactaaaaatacaaaaattagctgagtgtggtggtgcgtgcctgtaattccagctactcaggaggctgagacaagagaactgcttgaacccgggaagtggaggttgcaatgagccaagattgtgccactgtactccagcctgggcaacagagcgagaccctgtctcaaaaaaaaaaaaaaaaagcaaatcctaggaggccctggggagtgaaccaaagtgggcagacaccggagagaactggctgcttggaagaaatggatggcacaacgtgagtttcctgttttttatagcaaaacttgagggcaggctgaagtcagcacagcacagacagctaaccctccagcagaaatcaaaacagcagcagaaatcaaaacagtgtggtactaccataaggacagacacagagaccggtgtaacagaacagagagtctatatgcatctatggccaactgatttttgacaaagttgtcaggaaactcaatggggaaaaaacatgtctcttcaacaaatggagcttggataactggataaccacatgcaaaagaatgaacctgaacccctacctcacatcatatacaaaaaggaactcaaaatggatcaacaaccaaaatagaagagctgaaccataaaactcttagaagaaaacatggggttaaatcttaaaatccttggattttgcaatggattcttagatatgatgacaaaagaaaaaaaaatgtaaggtggacttcatcaaaattaaaatcttttgtgtatcaaagggcatgatcaggaaagtgaaaggcaatctatagaatgaaagaaaatatttgcaaatcatacatctgacaagggtctagtatccagaatatgtaatgaaaccttacaactgaacaacaacaacaacaacaacaaaacataattaaaaattaggctggatgtggtggctggctcatgccagtaatctcagcactttgggacactgaggcaggcagtttgcttgagcccaggagttcaagaccagcctgggcaacatggtgaaaccctgtctctacaaaacgtacaaaaattagctgggtgtggtggcatgtgcccatagtcccagctatgtggggggctgaggtaggaggattgcttaagcccagggggttgaggctgcagtgaactgtgtctgtacctctgctctccatcctgggcaacaaagtgagatcctgtctcaaaaaaaaaaaaaaagacaatggacttgaacagaaatttctccagagaagatatacaaacggccaacaagcacatgaaaagatggtcagcaccattagtcatcagggaaatacaaatcaaaacccccataaggtaacacttcacacccaccaggtcagctataattaaacaaatgaaaaataacaagtgttggtgtgaagaaatcaaaacctttgtacattgctggtgagattgtaaaatggttcagtaactgtggaaaatagtttgttcgttcctcaaaaagttaaacatagaattaccacatgattcaatagttccactcctaggtatagacccaaaagaactgagaacaaggtctcaaacaaacacatgcacacacctattcatgcactgtgaacaacagccaacagggggaaatggcacaaaagtccattaacaagtgcacgtggcatatacatgcaatgaaatagtaattagcaattaaaaaggaatgaagtactgctacaagcttcaacacggatggaccttgaaaacattatgctcagtaaaagaagccagatacaaaaggtcacatattgtatgactccatttatgtgaaacatccagaataggtaaatccacagatacagattgtggctgagttgttgccaggggctggaaaggagtggggagcaactgcttaatgggtaaggggtttccttttggggtgataaaatgtcttgaaactagatagaggtgatggttgcacaatattgtgaatgtactcaacgctactgaattattcattttataatggttaattttatgtcatgtgaatttcacctcaattacaacataagaaaaacctccaagaggaaactcacagtctagaattcagggcaaccacaggcaccagaaagtgaggatggatcctggaaagtggagagccagtgaggggaacatcaaattctttgtatagatgatgcctaaatctctggctgacccctgaactatatgtactcagggcagactgcaagtaacccagctgaggataaatgtactgaactgagatttgagctactgccccaagggagagtttgcagtttgaatcaattaagttagttccccctaaaacaaaaagtaaaatcaatacttgttgaagaaatgtaatagaatctagattctctctgacttattgcaatgcccaagatatattcaaaattactctacatacaaagaacatgcaacccattctcaagataaaagataatcaagactgaccctgaaatgatgagatgttgaaattagcggacacgaattttaaagctgctaatatatttcatgcaataaatgacaatgtgctcatttagtaaataatagtaaatctttagaaagctagaagttatatataaatataacttttttatacattatatatatacatatatacaatgtatgaaaattttagaactgaaaaataaaatatatcagatttaaaaattcactggatgggcttaaccaaaacatggagacaataaaggaaataatgaacttaaatatatatccatagaaattactcaatctgaagaacagagagtaagaagattgaaaaaagtgaacagggacaatataaaaacatctaacataggtgttagtgaagctcaagaaggaaagaaaaaatggggctaaaagtttgaagaaataatggttcccaaatttggtgaaagacatgtatttacagattcaagatggtcagtgaactctaagcaggataaccaacgactcatcatagtcaaacttctgaaaacctaagataaagaaagtggggacaagaggatattacatccagttctcagctacccgtcctgtgcatttcaacaattagacaattggtacagacctggacaccaatccatgtgtccactagagtcagcttcctaccatagtgtatggggaatgctgagctccaattgcccaaacttcagaaggctttgcccaggctcattcctgcccagccatgggctataagtccttttctctatgttgaacagagaggtcaaccaaagggagaaaataaccttttatctctgggttgccagaaagtcagcaacacgttggaaaggggacccagggccctccctcatgcccccgttatctgcatgtgcagatttcagctgattccccaagcccgatgcagaggtctctcctccctctgtgagtccctcctgaactacagtatgatgcttctggattccagaaattagggctgttttcatagctgggacaagttttcttggctcagggaggaaagtaatagttcccagtctttttcctcctcttccccacaattcagtgtttgaggagggagggaggcaaagagtgctgtggctggtgcagaggtggaaatccacccactgcctcacttggagtgatttgcaaagggtacgtagagacacttagggaaagtaaggagaggtgcgtctttcttcccgtgcctcaccccctcctcccatgggacaagggcctcagaaggaccacaggggaagcagcttcttcagtggatttcctagatctatcatggcccaagagcaatgctcagatgcccaatgcctgcatgcgcatgattggggctggttctggttttcattttttggggccctgaactccaaggtcttcatcttggaattcaagggccttgaccatctggtcctttccttgtcattccttggagaggtagcgggggcccagccctccccttcacccatcctgcacttggctaatgctcccatctgtaggcctcggccagcccttgcagtgccctctgcctggaatcctcctcctgagcctgcatccctacattccagtgactaagtatctttatgtccccagttcaaatgtcccatcttccttaaagtcctttctgatgcccccatgaggaaggtatttcttccccattgagtcattgctttctatttcattttgatttattcaatatttttgttatgctatagataactatctgtcagaagctcttctaagagcttttacaaataattgggtaatcctcacaacaacctcatgaagtgaggactatcatcctccatttacagatagggaaactgatgctcggagaggctgggtcacttgtctagggtcatcatagaggcagtctggctctggggttccccctctctgttctctattgctctataaactgcttgaggcctcatcaattgattaagtagaggaatagaaaagcctggcactctgccaagagccctggggggaaggaaggagtgagggggaggaggccttccccctgaaggcccccagagcttgaggaggacaagcccagttggacaagactgaggaaataagatggtaccctaaccgagttcagtgcctctctgctctgcaaaagcagggatagggtggggagagcacagattgtcttctctctggttgcctagctgccccctgatctcacctgacactgggactctgatcccctttcggtcagctccactgcaccccaccccgccccagatcccgactctctctgcttcttcacgcctgtgggcccaggctggactgctctgcccgtttcccggatgtgaaacagatccatactgcagagggaattgcccttcaataagtgatgagttcccccaagagctctcctgtgctttccccctccagagaattttctgttttgtttacttaagggggtgattccttttcatgttctccttcctgtatcaaagacagcacggcagacagaccattaacaaagcagggcctccgggttgtttttccaggaggaggactgggcagggccgctcagcctgctgggcctcctcaacctccaggctccctcccaggtccccctcactgctggctggagcaggagcagggaggaggacttccctctgagagcagaaaattgggattcaaaatagaccagtgttaggaagccaatagcttctccatacatactccaggcaagctgatagaactgatagttcatatttttgggctgggcgtggtagctcacgcctgtaaccctagcactttgggaggccaaggcaggcaggttgcctgaactcaggagttcgagaccagcctgggaaacatggcaaaaccctgtctctactaaaaatacaaaacaattagctggtgtggtagtgcgcctatagtcccagctacttggaaggctgaggcatgaaaatctcttgaatccgggagtggcagatggcagaggttgcagtgagccgagattgtgccattgcactctagagagactctgtctccaaaaaaagaatagaactgatcactcctattttttagaagagtagagaccctcctaaaatcaatcttaaaatagcaacagcagcaaatgaactctagtgcttcccagaatttaatgtgcatgccgcacctggggaatcttaaaatgcagattctgattcatcaggtctggggtgaggtctgagtttctgcatgtttagcaaccgctgagtgatgctgaggctgccggcataagcaccgctctcagccactcaaggaactggtgcatccaaaagccctgaactaatccggcttcacgaggggaagatgcaactataataagggtggccgtggtgatgttgttactaggaggagtggttattgagcagttactctgcaccagatactccatgccactgtggtacaacagaaggaaaatctatccagccttgcaggattttcctaatctctctccaagagtcaacagggaaggaggaaactgaatataagaggattaacattttctttgcaatatgtctcactgccccatttgatagacgaagtaactgaggctggaagagctttggtagcttgccgaggtcccataactcacaagcagcagggccaggattccagctgaggtgtgctctggctttcaagaccatggtaatttgaacacagcctctcatgagacagggagacagaggcagagagagcagtgcataccaggcaggaccagacaagcaggcaccagggcgcgaggcggaattccacatcctgcctgtgacgcccaagacagtctcctaggcaaaactggggaacttcatggagaagtttctaggcctgctcaccattcttctacctcacccttgtcgtattcctggagcctgagagaagagggtcccctggccttgtcagccccatgagagggggcagcaggagaacagggtcctaggtggtggcctctctgctttccagagcaggaaactgaggcctggagaggggaggggaacacctgaaggtctcaccagtgggcagggcagggttcttgggcttgcgacctgggcagtcaccctgggccccacgcctagaagggcaccacccttggtgtaatatttctccgctgccatcttgaaattctgattaattttttaacaccacattttcttttcttttttctttttctttttctttttttgagagagagtctcactctgttgtctaggctggagtgcagtggtgcaatctcggctcactgcaacatctgcctccccggctcaagcgattcccttgcctcagcctcccgagtagctgggattacaggtgcccgccaccacacctggctaatttttgtatttttagtagagacaggattttgtcatattggccaggctggtcttgaactcctgacctcaggtgatccacccacctcagcctcccaaagtgctgggattataggcgtgaatcaccgagtcctgcagcattttcattttgcaccggatcctgcaaaagatgccgctggtcctgccagtgggttagagaacacgtcagggctataccccctttccgagctgctcctggaggccaagacctgagcactgagcgagacagagccgtctctgggcaggctgctgcaagccccaacctccaggcagcgggagcctggcaggctggaaaacaaaagaaaacttcaggagaggccaggagggaggaaggaccttctgagagggcaagagatgtgccagaattgcgcctgagcgagctggggaacagatcccaagtcctcctctcttgtctgtagtgacagatgaatgcgttggccggggctcgggagggggaggacaggggccagttgtcttcagggccctggcctctccaaggaaacctccacccccaccacacccaaaccccaagggctgggcaaatgcacggcgcccagctatgccagcctgtcccaggggctctggggaatttaagccaagtccttcactttgattttgggttggccaaaggagaaggaaaaggccaagtggattggattcagaagctccagcctggcctgcaagttccagctcagacaagaggcctccctccagctccccatcccccaccactggttactcaggcctggtggagagcaaagccagccagacatgcattcctctgggccactgtcctgtgcccagaagacaggtgctggcatcagacagggctgaggaaggaattctgggatggaggcaggacagaagagagacttcatcagcccagcacattctaggaagacagcgatggaatgggagggttctctggagacctggggacaggcctgaggttgtctgagccccaggggctggtcttcgatgtggaccccagagggtttcctgatttatccatgagcttggacctgctgtgctgaggacagaggggcagtgttcggtctccttgggtagcgtcttcaccctgtgaccccttctccatcttggcctgcgcagggggcccaatcaacagaacccaacactagccgggggggtgtaaaatccaaaaagaacctttgcaatatcggacaactggtgaacactgccagcatgagcatcttgtatattttgaaccaactctaccagcccattttctagttgctaggatggtcacctccaaactcatgggggttgttgaaaggattcgatgtgttaatacatgtgaggcgcttagaacacagactgggaaggggataggctttatataaatggtggttattaccatatttcctctaaatgcacattgttttcattttcatatctctggagtcagaatgtattttgtggattaaatggcagcattttttttttctttcttggcggcacataaaataacatgccttataattgatgtgtcttaggttcagtcaaatatgggatgaaaaggaacactgtattcttaagaccgcatctttcagcgacgcctccttccatgtgagttgagtcctggggtgctcctcagctcccccacccatgtggaaacaggcacagaggccacagggagcaggaggccccagggagcagagaccccaagggcatgagggataagcacaaagtcctgggccaagggtgcccaggttggctgagccctaggcggacaggtcaggagcacggtgggcagtgggtgggacaggcccctaacagagcccctcgggctcacatagtaattccattgctgggtcagccacgttcccaaatcgtacatcagacaatcttcccaccaaccctcgagtgtgaggatgttttgtttgtttaaaacccacatttggccgggcgcagtggctcacacctgtaatcccagcactttgggaggccgagattgggcggatcacgagatcaggagttcgagaccatcctggctaacacggtgaaaccccgtctccactacaaatacaaaaaaaaattagccaggcgtggtggtgggcgcctgtagtcccagctactcgggaggctgaggcaggagaatggcatgaacccgggaggcggagcttgcagtgagccgagatcgtgccactgcactccagcctgggcgacagagcgagactccgtctcaaaaacaaaacaaaacaaaaccaaaccaaaaaacaccacatttaacagatgaggaaactgaggctagggaaaggctaagtcatctggccaaggtcatttagccaagcaggcagaactaggccacattacaggccagcctgagaatatggcctcctcaggagcacagagaggaggcaggggggccaggatgccacccagcacacaccgtggctgagaacacaggctctgcgcccagttcctgggtccgttcctgaatccagcactcataagccatgctactctgggcaagctgctgggctctctgtgtcggtttcctggtccatataatgggaaaatatgcttcctcctagacgcctgagaggattggaggggcagatccacagacagcatctagattgacattgcacctgcaaaggctcagtcactgtgagcttttatgatgccctgagttctggggaaccccaaaagctcctgatccgggagctgacctgcaggttcccctaaccccactcatgggccttgagtgtctggggctggtgtggcataggagagctaaactgaccacctgggacgggcccagagagccacacccctaaacaagcagccagttctggggtcaggagagccagggaagtggccgtctgtgctgctcatggggtagcccaaggctggtcactcctcctccctgattcccagccctgcagaggatattcaaactcaccacacttcagagaggtgctggggcacacgagaggaagtgtggcccccttccaaagccacgccccagagactggctcttcagccaccccctcccacccctggcaaaggctggtggctacccagatgtggatctggggtgtccatgcccagacccccctggacgtgagctggagaagccagatcatgggtccagctgttctgcagctctcccacctcccaattctgctgattcctacgtgggggatggtgccaaggagggtccagagaactcagtcctgccagagactggccagcagctgcagtgggtggagcctgcggagggggcaggaaagccaggctcctgagctcgcacctcacttgcctttcttggctgcacatcctcctctataaagtgaggtagccctttgtaatctgaccttagtaattctctttgttccctaccattttagctcagatacgggccctcagggaggctccagaatctggagcccaaggagggtgctgggaagaaagaccacaagccccagacgcatctgcctgtcccacatgtgcttagatgattcaccgtggtttaagctgctgtttccctcctgacgcttgcatagcttctatgagatggttgctgcccaggaatgcaagtgaccctgagtgtaagcacctgagggcagaagccacttggggtgtggccaggtacactttggccttagtgattagatacgaccaaggtgcgtatttgctgtctataattgctgcttggtatcagtaaggatgaaaaagaagaccccagcatttcctagggaagacgggggcccctcccatcctacaagactcagcttctatgttacctcctcctctggggcagcatctcaggtcatccctctggactcccaaatcacctgtcctatagtaccaaccacaggcttgctgccttcacttgaccgtgagcaatttgagggcaaggacctgccttagactgggctggatcctgggcacctcacttagtatacagatggtgcttagtaagtgcatgagaagcaaaagaggttcatggttttggttatccattggctcatgggggttactttggagcttctagaaaagctccttctcccaggaaggagggctctgggctggattttctttccttttcttttaagtcaggacaggaggggcaagagcctcctgaaggaagaagtgaagaatgagtgctggtcaataccaaccccccaccaggtgcaaggccatcaccacgttcaagttcatgtgttaactgagctttgctgtagccctctgcagttgcagcagccgactcggagtccatgggcagaagtagctcagctcagccaccaccatgacacctagactcgggccctaggagaagcaccttctcttcaaatctttatgccaggccttctcaaagtgggctccctggaccagcagcagtggcagcgacacctgggaactgtcagaaatgcaaattcccaggcccctcccagacccactgcttcagaagctctgggaatggggcccaggaatatgcattctaacaggtccccaaatggtgctcaagtatgagacccactgctctaggccactcccttacctccatcaagaggcaggtgacacttgggctctcagaatgtggctcctgatgcctcagatgaaagggcaccccctcatccctcccatcccgccctcctccctcctcaacccccaggttcccccagggcctggcactatgaggggcctaagtgtcgtccctctctctgccagcatctaggaggcatggctgtgcctcagcttggactcagcctgggctctaaggacccaggacccctcaagatctttctcagcagaggcctaatccctaaaccctggggctggacattccaagttcctggagacacaataagtcctaacattcccggggaggtggcaggcctgggggcacagacaatgggccttgtgttcgtccccacgccttcctgcttcaaaccagggctctgcaagggaggctgagctgtcaaaagcaccactgtccaccccgcttgtcctgcttgcctttgcccaaggcccaggctgaggctggcaacccctcagcacaccgcccctccctgaagcagaacggtgttccttcttcttggtggtttccagcactttctaggttcttcgtccaccagggcctgaggaggaaggggttaaatgccaacacctcccttctctgtcttcgtggggctctgggacagaggagcatgggcagtggacagagctctccagccacctgaagccacagccagaagcgcctcctctctggggctgatttctcttcattagagccatcacatcaacactgacagccgcgtatttattactgtcccgacgactaccatttttcacccagtgatgcgcaggcggataatgagcttggagcccagctaatgaggaactcccctcggccctccttggcagcccaggccccacaacggtctgccggccaacccgctctctgcctgtagacactacaccagggcacagaaaggaactccaaatggggaagtcaagggtcaccaggctgagccagccagagctgtccaaagccaacacgcacactgcccgtggggaagagactttggggttgaccgagcaatcaggtctgagcaccgggcaccgtctcagggcagaagcccctcttccattctgggttctgagtcctcaagccagggcagccagagacaaacatcagggatgggcaggtgggctgccggccaggaaccccaggggaatgggtgagcaggtgggctgccagccaggaaccccggggaactgggtaagcaggcgggctgctgaccagaaaccctggtgggggactgggtggatgttttgggaggaggtgcttgaacctaatcaagaacatttccttagtgatgcatggggaaggcaaggtgcttgcagctgtatggggcaccagccacacacagtaaggacctactttgcaaggggctggtcttctgggagcctcagctcttctggaaggtacccacacatctaaatgaaaaaggcccctgggcggtggacatagtgatcccagagcccaaacctctgactaagagagtcttcaagccctcaactagtctccaaataagaccccactgctggtgttgattggcttgcctggcccaaattaagagggggaggtgggagggtccaagacagctcctctaatggtttggagcagtttgggtgaagctgaagaagaacccagactaccacccaatcacccaagcagcagggtccccttgggaggggcaacagccgtatcctcactcccaccacccttaaggcatggccataggccagccatagcagataggcagtgtgatggttaatattcagtgtcaacttgattggattgaaggatgcaaagtatggttcttgggtgtgtctatgagggtgttgccaaaggagagtaacatttatgtcagtggattggcagaggtggacccaccctcagtctgggtgggcaccatctaatcagctgccagcatggctagattaaagcaggcagaggaacgtggaagaatttgacttgctgagtcttccagcctccatctttctccccgtgtgagaggtttcctgcccttgaacatcggactccaagttcttcagctttcgaactctcagatttacaccagtgattttccaggggctctcagacctttggccacagactgaaggctgcactgtcggcttccctacttttgaggttttgggacttggactgacctccttgctcctcagcttgcagatggcttattgtgggacttcactttctgactgtgtgatccaatactcttaataaactccccttcatatacacatctgtcttgttagttttgtccctctagagaaccctgactaatacaggtagagtgactcaactatgtttgaggtccaactgctttagaaaacagcacagaaaattttaaacacaaacagcttaaatatatacatgtaaagcatcttagaatcttacagatgctgtgactcattcaagtctttcaagaccagattttgatgtatgttctagggggtccaggaagccatggggacgacaagccacatcttccagcagcatcaaccagctttaacatatcctttatgtgttgggatagaatttagatagcccatggagtagaatgcacatattcacacattttaaaactaaaataggctgggtgtggtggctcacacctgaaaccacagcactttgggaggcagcagcaggagcatcacatgaggtaaggaattcaagattagactaggcaaccgagcaagaccctgtatctacaaaaaaaataaaatgattagctgggtatggtagtgtacacctgtggtcccagctacttaggaggctgatgtgggaggatcgcttgaacctagaaggttgaggctgcagtcagctcttactacgccaccgccctccagcctggctgacagagaccgacatctcaaaaaatataaaattaaatataaaataaaatttagaaatatataaggaaaaggtcatgggatagtaggtggtttcaggctgcatggccggataccccagggcatgtgtccaccctccttaccatgagtggaacatcatggaagagtttggaaaagctgcatttaccttcccatttttttcccaatgaggacacttgtggccacacaggctaaaaggcctggcccaaaaggacccaatgagactcttccactgtggcctctgaggcccacacagagtcatgaacttgttatattctctctctgacttcacaattacctccatagcacccttaaaagagttaagtgcattaattcaagaaataatttacgtctagtacctcagtccttgtggatgaagggttattatctaaactcaaggagttcacaattaaagaaatcagttacacacagatattaaaagataattcagaatcaacaaggccaaagtgcccagcgagacatctagactggaacaactgggaggaggagtcccagctggaagtcagggacggcttcacgctagactttttggggtcagtggagaggagaacaggggttcgaaaggggagaaaggaaggtgctattgggctggcagggtggggagggcagtgtgagcttggtggaaggctggcgtggggacaggtggaggcgagattgcagtggcaggtagggccagattgtggagagtttgccgttgaggccacagctgtggggaagctaccagggttctaagagcaagggcgtgataatgacaggtctcagcatccagaccccatcactaagaccctatggacatcaagagggggctccaagtgtccttagagaaagaagaggccagcccagggtgccccctgtgtcctcctcctgtgcccacccaagctaaggagaagcctgtggtcaaatgagcctaccctgggtccaccagcccaaagcagcatggcaaacagttcctgaatgtgggtatcttggccaaatctaaggcaatggcctgggaggcagctgacctgcattcatcatctctttcttacaagtcaagcgaccttggcaagttacttaatatttctgaacttccatactaacaatgttaataacattaatactttctggccaacctccttcatagactggggtgaagagcaaatgcgatgtctatgaaagctacccacatacatttgagattttatggcaggatccaataaatacattcaccttaaggctgaacagctgataatagcttaataggtgggttctctgtgccatatttgcattttaagctggagacagagaatgtcttaaccaaatcaataaatccttaacagcagaagtttagatgccactggcaggtgtgtgaaagacaaaaggaacaaaagctgtcggggcaggggcacctgtcaaactgcaggccccaaacggaccttgcttccaagataaagatactaaggacaatgacatgacaaacacttattcagtgtttatgatacatacacagaacactgtgtcctaaaagcttagcacagctcgttaaaccctgtcacaacccaactgttatcctcgttttacagatgaagaaactgaggcatagacagggtgtgtaactcatccaaggtcacccaggcagtaaatgacaggtaggatttgagcccagggagtcacccgcatttcaggtttctatttttttttttttgagacagagtctcactctgtaccccaggctggagtgcagtggcgccatctcagatcacagcaaccttcgcctcccaggttcaagcaattctcctgcctcagcctctcgagtagctggaattacaggcacgtgctaccatgcccagctcatttttgtattttgtatttttagatggggtttcaccatgttggccaggctggtcttgaacgcctgtcctcaagtgatccgcctgcctctgcctcccaaagtgctgggattacaggtgtgaaccactgcgcccggcccatttcaggtttcttggtgctctctgctgtcccgtctgggcccctgctgccactttctgcactggctctcacggctcgaagcagcaaatgaagcatcagctccagattcataattaactcacattatgtggtgacagcccaattgttcaggtgcccagtgatatttttgacctttactcagattctgggcctcccagatctgtacctccagggaggtgcccagggaagggggaaatttccagagtcctggctttacgaggcccttgagagtcactggtgtccgccccagatgccaaattccctgaatgagcctcattatggcaaataatatttccttccgttaggactgtcacatcatcaaaatttcatcacccctctgggtcactaatagcttcctacatggcatcaaactttaattgcctttcttcccctcatcctccccaccctcacacctcattcaatttagaaggcatttgtgtggctcagttactggcaagccagttctgaatgccccaaatgaccttaagggaactcctcaaatagctttggggcatcccaaccccagagagagatggagacaaggaggagagcagaagaccttcaatattctgccaagttaaggcctagtgaggacacagccagggtggaggcaagagccaggaggagcaggaggaggaggaggaaaaggaagaggaggaggaggagttccaaggcctctttccaaactctacacccctccctggaccagcccgtcttcaaacagtacaattgtctgggcatctccctggagaatagctgtctcttcttgggaagacagtgacgtatgccgtggaagccaaaggcagcctggagcagtggaaagaggacagatgttgggaccagagaggcctgggttcacatcctgactcctcaacttccccgctagaaggtcttgggtggttaatctctcagcctcactttatccacatgtcagagtgatagggaggactgaggcagacgatggttgtaatgcaccttgccatgtctgacaagcagaactgtgcaccaaacgtgagctcgggatggaagggaagacaaaaagattctaaactggggaagaagcaaaagaaaatggggtgagccaagtgcggcagctcatgcctgcaatcccagcactttgggagaccgaggtgggcgagtcacttgaggtcaggagtttgagaccagcctggccaacatggtgaaaccctgtgcctactaaaaaattggtcaggcgtggcagcacgtgcctgtaatcctagctactcgggaggctggggcaggagaatcacttgaacttgggaggtgaaggttgcagtgagctgagatcatgccactgcactccagcctgggtgacaaagcaagactctgtctcaaaaaaaaaaaaaaaaaaaaaaaaaagaaaagaaaagaaaagaaaaaggtgagaagatgtggaagatatgggtgaaatatacagcaaagataccagagaagaaaagccgtcttaatgcagtcttaaggccatttggaggggcaagcacagaagtacaaatatagttaaagtcatttattaaacaagtgcttatgatatgtcaggctccattctcactgctctatgtgtattatctcatttaagccttggaaggtttttctccttgttttacagacaaagaaacagaggttgagaatgttaagtgacttaacccagagtgccacagatagcagctgacagagcttgaacccaggtcagcccaattctgaggcactgatcctatacataccacttcttaacagcttaagggggaataaaataagcctccaaacaaggaagtaacagcacagactggggttctgctttaggaatgtgcaaggtaaaaatgtcttgtgtaaagtcaccctctgtatgaaatgcagagaccacaatgtcttctctgtggttatgaaggaacactaggcattgccagtgcatgagatcctgttgtctttttccagcacacgaaagcctgcacttcctagctcccttgccattaggtgggaccatgtgatccactctaatgaatgggctacaatcagaagaaacacaggctaaataattattattattgttttgagacagagttttgctctgtcgcccaggctggagtgcagtagcgtgttctcggctcactgcagcctctgcctcccaggttcaagcaattctcctgcctcagcctcctaagtagctgggattacaggcatgcgccaccacacctggttaatttttgtatttttagtagagacagggttttgccatgttggccaagctggtctcaaactcctgacctcagcctgcctgcctcggcctcccaaagtgctgggattacaggcatgagccaccgcgcctggaggggaatataagtgctgaggcaagatcttcctctcccttttcctctggagcattaatcaaggaccttgtgtatttcaaatggtacatccatgtatgaatggcattaccccctaaaccttctacccctcctctcaatttccttcacatcataaagttggagttcagctgatggggcttcagcagagacccaggggctgcccaacccagatgccaggcctgctaagaggcagattcatctgtcgggccagaatcaggaagagctgggaaaatgaccagaaaatctgagcagggactcctgtctcaatggcaacactaccccattccatggatgcatctgcgggagctgctggagggcggggcccccactcttgaggtacctggctgctcagtgcgctgagggctacatggcatggggtgtgctggatgtacagagacgagaggcatttcacaagtcaatcagctctggagatggggcgagaggcctggcaggaagctggagagctgggaggggccagatgaccgtgggctgtatgcctccagtaagcattcattcattcattcagtcttcatattatgctgactcctcctacgtgccaggcactgccctagtggctagaaatataccagtgaatgaaacaaagcccctgccctccagagacaccaataataaacaaacaagtcaatatatgtcagctggagctgagtgcaatggagaaaatgatggagagcgagggagtgggtgctggaagatgccacgttatagggtgctccgagatggataagacatattaggaggaagtcctggaggaaacaagggtgaactttgtagacatctgggtggtgtgggcaccactgatggaaaggcaggaacttcaagtgccaggttggaggcctggtaaattccaggaacaacaggcagtcagtgtggggacaggagtgaatgcagggggagtgaggagatgaggtgggaggggaggttcatgtctggggagtagaggggcagtgatcaggacaccctcctggactgtaatggacacattataagaacttaacatttacaaagggcattttcaaagtgatctggacaatctcatttgattatccaagacaactctaaaaggtagataacagtcttttttttttttttttttaatgagacagggtctcgctctgttgtgtaggctggagtacagtggcacgatctcagctcactgccacctccgcctcccaggttcaagagattctcctgcctcagtctcccaagtagtttggactataggctcccactaccacgcctggctaattttttcatttttaatagagatggggtttccccacgttggccaggctggtctcgaactcctgacctcaagtgatctgccggcctcggcctcccaaagtgctgggattacaggcgtgagccactgtgcctggctggtagacacaactatttttaactttactcattttacagatgagaaaactggctcagctcagcatcgcccagtgatggaggcaggattcaaaggggcagaagccacgctgggagccattcaccacgtctgcaggagaagggtctccccagggctccctgggctcagcaagaggctttttggtccaggcaccaggcccagggagtctgaggggacaagccctgcagtcccctctctcccttcccccggggatgctgagcatccctgctcaacgctgctcactggctctgcctcctgcccagcacatggacagcaggggtgggacacctaggggagggggcacccggggtgtctcggcaaccagcttgttttcctttccattacaggcagtgggctgcagccgccagttgctgctggcccatttgttgctattggcatcccaaggccccaaattatgatgactaattcccaccgctttaggcagctccagggctgtctgtggcaacatgctccagggggagcggggtagaaaccccgcagggcgcacactaacacccgacatcaattccaactcagcctcctgcctcccagaggggctgggagtccgtagggacagggagagggttccagccaatcagaggaccccttcaaccacagccagatcctaggaaaaccagctataaggggacaatttcttcatcagcataaaacatagctaacagccagctggtgttgagcagtagtgagtcctccatcatcaagggtatgcaagcagagaccagatggccttgtgggcagacgacggtcctagatgacttttcgtgtgtctttcaagtcaaatgcaatgattcccattagtccttaggacagaagataagcccattctcccctccttgttagcttacagcccgactgcgtcctgtggtacaaagtcaaatgtggaccaatatgcaggttaacacttcattttaaagtcagccattcaggcgctgtttaaacagaggatcgctgtaaagaatttggcctccttcccagcctcctttcccttgtagaacaaggttcctggcccctatgccggccttccagtagaggacacgaggaagaggcagtcgataaatatttgccgaacaaatgcatgaagcgggggtggggtgtgtgtgtgggggggtcgagggtgggatttccgaggcaggtgtcaggctgccagcgggatgtagcctctgggtgggggtcctgactctgttcctcccaggcaggggccattttctgcagccagtggaagcaccaagctgtatccctcatctaaccactgccagaatgttccggactcccccgcggaagccaaggggtacaaagggtgagggaaagaggggcatgggagagcagggacacccccattccactctcgagtggggcttttgacagctgagccccaggcaagcacgacactcggcctcctggtaattagcgaaaggccctgatcaataagttattttttgctgtcagtaattaataattacagcttagccacaccatgtaattaaactttcatcccgctcccttgtgtactgttggcttttattgtgattagctcccagcactaaactttctccctttggagcctttcaggagcctctagagctgggggttccagtcctctttcagggttgtccccactgccttgttctctcggctcagattcccttccttctgttctccccccaggcatgattctcttgaaagaaacttctggagcagctggctcggctgctcctgcccttctcccaacctctcaggctggccaggatgacctccagcagtaatcaagcttccaagcacatgggaaatctctcgagactctagttaaaagacttccaggctcacccagacctttccaatcagtgtctgggagcggagcccaagaatctgcattgctacaactccctgggagctaagtgcttgagggccactctttgagacacagtgatgtggccatggaaggaatttaaagaaacctcctgggtaaggaaaaagaattcaaggtcttattggtgggtggcagggtaccattcttcatggacttctagcttaatgttaaaaccgtcataacaagaataataattgccatgtattaagtaccttctatgtgccaggcactggctggggccctgcccctggaatatcttgaattctcctagcaattctacaaggcaagagctattattgccagtgtacagatgaggaaactgaggctcttagtggctaagagccttgcagaaggcctctcttcagcgaagcggcaaagccagatcatgagagcccgttctttctgctgccaaagccaatgctctttctacaacctcactgcactttgcttgggaaatgagtttgcatcatgtgacccatcgggcatacggccaatggtcaaatgttagctttcagtatacccaggtgatgtcgctcaggtccagcacccaccccccatccccaaaaaaaaccaaccaggctaggctcagataaaatctggtgacagtggtcgatgtgaagtttgtctcaagggaggaacaattgtttcgtccctcgttctgtgccatgcctggagaagcaggcttgtgggctcagaaatgacagtgctagtggcttcagctaccccccaaaggattaatgtcatggcctgagactggaaaaaactcactctctaaccccaaagcagataagaaaggacctcatgccctaatcccaccccctccaacactcaaacccagcactgccaagcctaggaccacgttcccacaatcctttgcaaggcttgcctccagggacacacacagcaggagagggctcgatgctggaaaacactctcggagccagagaacacgagcggagcagcaggggacctgggcagcctgacacgcaaaaagccagcaaacaagaaaggcagagaggaagtgaatcaatcacagagactttctctgcttctgacagggaagcccctcccgcaggaggcgcagggacagggggccacctggccttaacttcagcaggaggggtgggatcttggcctcaagtggatggcacaggtgtggacgtggggcaggaagggacacatgaagaccccaaagcaagggccatcaggtgccctggggactctataagggcctggtcctagatgagacaagaattggtgagccacctgcccagggaaatcataccattgttgaaaagtctgtagagcaatgaagttagaagggtccagacagatgctggcatcccgtccctccacgccgtccaggcttttggctagtaacactggttgtcccagagcacaactgtgaggctgctccaggatgaaggacaacccattcctattctgccagcatcagggtcctcctgggacccctcagagagggggcccagaccaaggagaccccatgcagctagtcctggtttgagggagagaggctcagaactcatctggttccagacctgcctctgcccccagatcacagagtggccttgggcaagtcatttaatgccatttggcctcagtttccctatctgttaaatggctactagaataagatgacctctgaggtcctcgcttgttcaaagattttatgatgatcataaaaataataacttttattaccctacatttatagggctcgttacaaaatttcgaagtgcttttatgtaaattacctcgtaaaatcctcccctcagccctgtgagtgagagctgattattttcatctctttgatcttggctctctggattgcctggcgcacgaggcggcgtggggagtgggttgcagcccccacagtccggacccctagggtgggtctggccccctcctgagcctgcgagagtgaaggcctagccctgcgagtcctggagctcggtccaggcttcgtctccctccgcccccagcaggcgccgctcggacaccgctgacaccactgtctggatcggcgaaccccaaagtcgaggaaccgccggtgcagccgcccttcacctcggggacctgcccggggaccagggggacgtctgggcatccaccctcaggaagcgggcagcgcagatcacacctcggatccttcgtagcactcccaaacccaaagccaccagcccttctccaccgcgaggctgctcccggcagccacaggtcacagcagcgagcggctgcacagactatcgagcgaacagcggaggctggaggcaggggcggggatgctgggtgtgggtggatgggtaggaggggaggcctcagaccctccctgtgcaccaccccccggtgggtccgcggctgcacccgcgaccttggctccaggcccgcgcagcgaagcacccccagccccagcggctggccgagcagccaggggcgggctcccgtacgtggccaagccgggcaattgctctccccgggcgagcaacccggcatccagcgctcgcccaccccactccctcgccccggggaggccatcgcctgcccggcaggggccctgcccttccccgcagacaccgagcagggaaccaggagctcggtctgggaagctcagcgtagccgagcgtggagcccggcacggaatgtcgctcccctcccaagccggcgcagggcagccacagcagacggggggaggggagcgcccctcccacttcaccttgggctcttctctgcctccccaggtcgtccccaccttcccccattcggaagccacaagtctcggagagactgccccacccccaaaagagccccaaaacttgggagatggggtgtcttgaaactccctggagagggctctgccacggctaagccgggtgtccaggaggtcaccgtgaggccggccagctcccgccgcccctcccccgcccactctcccagccccctccctgtccccacgtgggggtccctccttaccttgggctctggccgcgcggatctgatgcagagctagcagtgtccagatcaaaagcccccacatggtgaccagcctggagaggggtcctcggggtctcccttccctccgccctgttttataatcctggtggggtccgataccccgtggcttagtcccaggaaacagtcagtctacgcggctccgtgccccggggtgtaatatgcccgggaggggcagcgcttggctaccccaacccttcctcctcttctgtactagtccgagcccggcagcgcgcccggaaggcgaggggcgagcagggagaaagaggccaggccgccctctcggactagggcgcctctctcccttagcaccccaactccgacttctcccaaacagggcggcctctgcgatccggccgggtcgccggccgagctccggaataaatggacaacttcaggaaacttcctcccgtggccacgttgcccgccccctccccgccccctggttgggttctcccggccgacgcagtcaccgccgttccaggcgccgggcccccgggacccggccagagccgagcgcagtggcagacgcgggtgcgggggttcttttaggggcgccggtttcgggggacgcggtgagcatagcggtccgaatctccctggagctgaagttttcttctctctaactttgcaggcagcatctggcggggccgaaccaccccctctgggctccaccgccctcgcgccgaatcgggagacgccgggtctcctccgggggcgctggggccgggcgcgccctcggctccgcgcccagccggctagcaaactttgcgggtcccggagccgggcgcgcagccctgagcgcccatgtccgcgccagccgcggggcggcgggggagggtgctgggcttcgcgacgcgggctgtcgccggcgcccgggcgcagagcctcctgccggcccgaggatggagaccggcggctctgccctccgccgcgccccggccggagctctcgggaagacgcacggagagcccggcgggcagccccggctccggggacgcggcgccccttcggacgcccggcgatcgccgacctcccgggccggaggagcaacggccgccccagcgcctcggccgccgctgccgctcgccgagcccgccgccctccgcttcccgggctcggcgtccagagagccgctcctgcctgcgccgagccggagctgcgggggcagcgtgagccggggacgagcgcggcggaggcggagacgcggagaggggggccgagcgctaccccgtggccgcgactggagagcagcctgcgcgccgggaggggcggcggcggcggcggcggccccgagccaggcccgggagcgagccccgcagaaatacaatccgactgcgcggccgcgggcgcccagcggctctgggacccgcaggggggcagcagtgccaaccttctgccgcgccgggagagatgcgcgcgagcccctccgctctctgcccagcctttccttccagcctcgctcgcgcccctgtctcaaaggcctcataggactcccagagtctcctatagtcgggagccccca

SEQ ID NO: 539 - DNA, 222186 bp, Homo sapiens
  source 1..222186: mol_type = genomic DNA
ccctcccgaggcctcctgagcctctaacccccagataaggaaaggggtggactcagttgaagtccagtgtccactccggtccaatcagctctacctggggtgaggggaaactcctctggctgggctgctccctctgcagggctgtggctggacagattactcaagaaaggaagcaggtgggccggaacgaacccacggtgccacataggcctccgttctcatgcatataagtttcccacactcaggcaggaaatgaaaatgcttcttggacccccaaggagagtaaaggagaggggaagaggaggaggatttttcggggctgttagtgacactttcagcctcctgtgcatttttgggagggctgcaggagaaggcaatgctgcgcccctacccagaactagcgagcgcttcccaactggcctcccgccttcctctcgtcctctacggcctccattggcagctgtgcaagggcccggccctgcctctgtctctccacactcgctgtgatacctcaggcctcccaggctccgccacgcccttccctctttcgggaacagctgccttccatcaccttggctgcctggctaattcctgctcattccttaaaaccctgttttgatttcgcctcaataaaactctgacaccaccctccagtcataattagtcacttcttcctctgtacgttggaaacaccgctttatcgtggagactttaaggatatccaagtagagagaattcttccgtgcaagttttgcatcctctcaccactgcctgcgttacccgagttgtaaagggcggctccctgtgtctgccccgctgcaccgatacaccgagctgcgcacggtgcccagcgcagggagaacaaatgatcatctgtccaacgcgcccatttacaggtgaggaaactaaggctccaactcaatcgacgcactctgcccttttgattaccagaaaagtagcaggacaggtgtcctgtcccgccctaccccggcccactaagccggcaccccggctccgacccccggctgtgcccggcgccgccgcggtgcccggcgccgccgcctcgcccggcggggccgcccggagcgcccgcacctccgcccgcttccacctggccgggcccgccccgcccggactcgggactgggaagtgcggcgactcccggaaccagccattggcgccagcgcggggagctgggggtgcagagctgcgggcgcggcgggccacgcaggcggcccccacccccggcctggcctggtctggtctggtctgcgctgccgcgcgggggcgccccctcccaggcccggcgcccgccagccccgctccgccaggtgcagcgcagcgcaggggtgggcgggggtggggctcggcgcgcacgttcacggggcggggagggggcgggtcaggggcgggaccacagccggctgggccggggttctatgcgcatctccggggaggggcggggcgggggcggggccggggcggggcccggtcggtgcactccagacggcgggccgccccctcttcccgccttcctactaccggcccaggattagcgccctgggagcgcgcgccccgctgcctcgccgccacactttcctgggagcggcggccacggaggcaccatgaagaagtcttactcaggtgggcttcgcgcccggggtggggaggggtcggtgtcccgggaccagcgctgctcacctgagtgcctgcggccgggagtggcgaggcgcccccggagctgagcgagtccccgcggcgggcacactgcaggtcgagttcctcccaggacagggccgctgtcgggccgctttcgacctgagccgaccgtcccctgcgctgtctccagcccttgctcgagtgtcggaggggctgccctgggggacgctccctcttcctcgccccttgcaccctcgcaggaatcgctgactttccaggtcggccgggtgctttgggtccctgtgcgtctgtgtgggtgaatggggtcggggctaggtggaggggtgtccttgggttcagcctctagggctggtggtccaggccgcagcatcctttcttcggattctcttcggtttctcctctacttagtggggcacgggacggcctccagatgggaccgtccagcagcgcccaaacttggcgactcgggttcacgttttgcgctcaggacgccgcccgcggctgacatcctcactccaccctagcagggcccgccttaagtaggcgaagggggcctgacttgggcctcaccatgagccggttcaggagctttcatttcataagaggctcccgctctggcactctgaagttccatttcacagatgggcacaccgaggccacaagggcaggttaagagaaatccagatcttcattatttgtcttttccttccttttttttttcctttgtggttttctccaaaggatccaggcaggcaggatcctttgtcctcctcagtcctcaaattataaatagcgtctcctcttctaaatctagaaaccgtttgtttaatgtccctcctttaattcattcagatagaaaggtacctgccaaggatccatgaattaatttttattgataggagaacagaatcatgggccttagttggaggtgaaggagtcatcggggccatccccctgcctttgggccattgtcggtttcctctggctttccatatttaggaaccaaaatgagtgataaagtaccttgtctcaaagaggattactcagaacttccccgaaaatacccttctgggtcagtagcttagaatttcaactttcacccggttgttgcgaacaagatggccctctacgcacccggagcacagctctgtcaggagcgtgggtgggttggtgtgctggtgggcgggagcgggcttccaggtggcacatgcttggttttggcaccggggcttcctccccaacatgctccaaatacttgagattgttgtggggatcgcgcggtgcatggccctttccaggggatctctagcccgcccagggagggccctttgcccttggtttcttacactttacctcccactggtgggtccagacagtgggggtgaccggggtcctcccaggtcgtgggtcctgggttttttctgcggagaccctcctgcacagatgccggaagggccctgaggcaggcttggagtctctgcacctgcggcttactgggaggtggggagaccatcacttgtccttttctcctctcctccacacacacctaccccacccctcactgggtttcttttttttttttttttttaaaaaaaaggacagaaccttttgcagtaggtggaagtagagtttgtggagtgagcaggaaccaactcttgtacagcagcctcggtgcctccttgtgtttacctaaaggggcaggcccctctgaggatgggggaagggagggctcagaccatttctggtttgctccctgcttggcagtggcccaaggtgtgctgggtcactgtgttgcagttgtatggagtgggactggagggggctgatggtgggggtggcctcttgccctcattctgagtgtcctggagctgtcttggcaccagcccttttccgggtacgggcactcgcaggagtcaggctgaccccccaacaagccatcgacaccatgaaattaaggaaagcagcaaaagatgttaaaaatcccccaaggctctgacaatccaaggacaacaggaaggtctttattttttcatctagactgtgcgggattattgcttccagacctgtatgtgggcttcagaataaacggaatgaccataatgttgttcccggtagacctggtttgaacattcgtgagcctctgaaaaggagaaagattttagaaggatgtgttggggcaatctcaagtaccgtgggtctatagacagtcatcgaagacactttatgtgctgggcacacatggccaagtctgagtgggtacagaaatggtaatgagatatagtccttgcctgcagagaacttacattctcaccgggagtcaggatgagggcgagacaccagctcattaacacccttccctcctgagcagttcagcctccaaatactacaggaatgccccggaggttttaggtggaggtgagattgagctgggccttgaggaaggagaagtcttgagtagtggagaataaaaagggacttggccaggtgcgcttgaagtcccagctactcaggaggctgagacacgaggatcgcttgagcccaggaggctactcaggaggctgagacacgaggatcgcttgagcccaggaggctactcaggaggctgagacaggaggatcgcttgaagccaggagttcaaggctgcagccctgtgacagcgcctggaaatagacacggcactccagcctgggtggcgtcatgagaccccatctgtaagaaggtcttttccaatgcggaaggcagcaagggcccacacagggcagctgcaggatccagggggacactggggacaggttctctctggcagctccactgctgctccaggctttcccgattgcctcacccggccttccaatggggtggaggtagtggtagtctacaggcagtgtggtccagtggttacacttgggggctcagagccgccagccccttgggattaaatctcaccaggctgcgcctctccctgtggcacaaggttctcacctcatgcatctcatttgcctcatttgtttttttgtgtgtgtggtgttttttaattttatttatttatttatttttgagacggagtctcactctgtctcccaggctggagtgcaatggcatgatctcagcttactgcaacctccgcctcccaggttcaagtgattctcctgcctcagcctcctgagtggctgggattgtaggaacgtgccactgcgcccagctaatttttatatttttactagagatggggtttcaccatgttggtcaggctgatctcgaactcctgacctcgtgatctgcctgccttggcctcccaaagtgctgtgattacaggcatgagccaccacgcccagcctgcctcatttgttaaatgggacagtgctatgttgttgtaaaggttaaacgagttcatatttgaaaaagctgagaaatgcctgctctgtaacctgttagctgctgtcatgatcatgattgtcattgacaggaggatggagaaggctggggttacgccattgctaggacgttccagaagcctccatgatcttcccttactgtggtcagagcatggtgcagggtctctcccccagcccctcagcactggagccagctgcactgtacccgccctggctctctaggttctgagttttgggactccctttgcatactaggtcacatggaacttgccgtcattcccaggctcccctggaaactctctgtgggtggcagcggcaggaggacttacccgaggccgatgagccacagaagcgggactgaggttgcgtcacacccctactggcacctgggaattactctggagattctttttttattttttatttttttgagatggagtcttgctctgttgcccaggctggagtgcagtggcacgatctcggttcactgcaacctctgcctcccaggttcaagcaattctcatgcctcagcctcctgagtagctgggattacaggcatgtgccaccgtgcccagctaatttttgtattttttagtagagatggggttttaccatactggccaggctggtctcgaactccggacctcaggtgatccacccgcctcagcctcccaaagtgctgggatcacaggcatgagccaccgtgcccagccactctggagtttctctgtggctttcaggagattcctgaaggggcaccagccacgattaaaaagctctatgctgtcgtgacttctgagtcctgggcagggagggaggctgcacccacacaggaagcagcttctgccgtgattcagtgtgctggctcgccgtggtggacagggctgcaccctcacccagcgccccgggagctgacttacgggaagggcaaggaattgcaccctcagagaacacttccccagtcagctaacccggtgacaggcgagcgtgggaagggcacaagcacagggtttcttcctcttctcccccagccccgtctccgcgcctgttctcgctgcctcttgcctcctcacgtccaagcttgtctgctctggcgcattcaggggacctggactggagagaaaaagccacctcgtacggttagtctgtggctctgtctgacttgtgtcctccgccgaggcccctcagttgtgagacagctggctgagcctaagtcctggggccagccctctccctagtctgttgcaaaggtagaaaggcatgcccaggcaggggccacctgccctgcccgctcacgccagaccgcaggcacttgcccgtcagatctccccggcctgcccagagggattctgatagccgagggcaatgcacctggcagcggagcattgcgtttgcgacagtccaccttcttcctggaaccaccccccacaagtgtgaccagctcaagccaggacaggtacagggggacccaggattgccacttaggggcagtggtctggaatccaggtccaggtgacatgggagccaaccctctgcttggagatcccaggtgggtgtttgcagaggacatctcacttgaggacccatggaaggggacacttcccaccccctacctggtccttgggctgccctcctctgacactctcctgccatcccaggcagccctgacagccccatgtgactgggacctagaggtggcccctgtttccgccccagtgtttgtccacaggcagtgttgcgtgggctctgaagtttgcctaagatggacctgataaggggagttcagtacacatcagtgcaggcccggccagggggtgatgatggcagttcctgggcagatccagctggctttagggtaggaggggctccagagagaggctccaggcccctaggggtgtgaacctttggggtgaggcgggaagtgacgcgctgggttcctgcgcctctgtttgttggagctattaccttggaaacatcccagctctaggcggttgccagggatttatggggatcagtgggtgccaatccctgggtgaagccctcggggcttgtacacagcacacagcgctgtggccccatggctcactttgctgtgtgaagtggctcagtctccgggagagtccttagccaggcaggcctgacggcaactgccaggtcatggtgatctggaatcgctgaccaaagggagtcagtcctggtgggtggagggacttggtgggcagccatcgtgatgccaggcatggggatcgtgtgtcacccaggcctgtgggtgccgagcttctgtgggagcagtgaagtgcccccgtggccgatgggctggtcacccctgcccctttcctgatgtgacagttgtgcctgggccccgggaaatttgccaggaggcctggcattggcctgctctactggagcggccctgctgagctgtgagctgcccgtctccctgaggttcctagcccatttcaactctccatgtggatttggtcattcattccagaagcgtctgccgggcgctgctgagtgtcaggttctgtttgcctcctctcctgtacgctggaggctctgggcaccagctctgcagggtggcctggccttgggtctccagggtagagcatggcactctctgctcccagcccagtttctctctgctttatctccctgaccccaccctgggcatgggcccatttgcagcccctgtgaagggagacattgagctgttgctggcagaggaggggcggctcctgggcactgcttgccaatggcctctcggcagctctgtgacagctgagctttgttcccagcctaatctgacctggttctccaaagcatgactgttggcagcctgaaaacctccaggacaggaaacaggagtggcgcagggaatgtaagatgatcccagcttcaagtcactgggcggcccttagacccaggctgcctgctgtctctggcaggaactcaagtcgctggtcatcctcagagcggtgttggcccggggccttcagtggcctttgtgtctgggtgagaggaaccctggatggccactctgccctgagtgtgtgggtccccagaagtgctgggttagggggcacggagggccagaaagtcccctttggagcgctggactctctcgctgactcctaccccaccccggcctggggtttcagagaaggggtccaggcaggagtgtcatcttttctcaatggggatgtggcttcagtctctgtccaggtgggtgcattgctctctttccggctcctcccaggctgcttaaatgacctgtgacgaggcctgcgccatggccggggccctctgcttttcccagcgctgcacctgggaaccaggggttgggccccggaagccgaggatgtccctgaatgccatgcctgggcacctgtcctggccaggcgaggcgtgttggggcagcggctgagatgggagcagcagcattgcctgccaggtttgagatgggccccgggtgagtgtggttaccaggaagggctgggcagagcaggcgggtgggccgcccctggggccttgttccgcagatcaacctgatccgcaccctggggccggggcttcctttcacagccttcccatgaactatggctcctgtttccatcccaaatcagatcccagaagaggaataatgtccatgtaacccaagccagttggaagtgggttacatccaacccctgtcatcttccagcttgttaaggacttgactaactcaacccagagggatttggagggttgtctgcaaaacccactaataacagggaactttagctctgtagccacagggtctacagaggtgtcgggctgtcgggttattgctgggaggtgagccggtggcgtagacaccatggaggcaccggtagtggaagagctgcaagtgcacacagaggccggcaccgaggggcggggaggaggaggtggtggatttctcgccagtgttggcatcatgttgcctccagcatcagagacccaaggtgtggctgaccttggctggggcgatgagtcattggatagcagagccttcctggtagctgggggttaacgctttaactgccgggactttgtattatgccgcttcttttttttgttttgtttggtttggtttggtttggtttttgagacggagtctcactctgtcacccaggctggagtgtggtggctcaatcttggctcactgcaacctctgcctcctgggttcaagcaattctcctgcctcagcctcctgaatagctgggattacaggcacgcgccaccatgcctggctaatttttgtatttttagtagagatggggtttcgccatgttggccgggttggtttcaaactcctgacctcaggtgatccacctgccccggcctcccaaagtgctgggattacaggcatgagctaccgcgcccagcttgcatttatgcttttttttttttttttttgagatggagtttcgctcttgttgcccaggctggagtgcaaaggcgcgatctcagctcactgcaacctccacctcccgggttcaagcgattctcttgcctcagcctcccaagtagctgggattacaggcctgcgtcaccatgcccggctaattttgtatttttagtacagacggggtgtccccatgttggtcaggctggtctcgaactcccgacctcaggtgatccgcccgccttggcctcccaaagtgctgggattacaggcgtgagccaccgcacccggcctatgctttttattattattatttaattttttaaggaaagcaatctaaactgtacactgtatcttttctttctcttttgctttttgttgtcagttttctgtattacttattgccaaacaacatgaacaggaaattgaaaggaaaacttcaacaatcattggctgtagcatttcttctgtgttccattcagtgcttgtctcctcaggaacatgacatagggtttgatttaattatgaaaggcgtatattttcagagttttatactccccatagaatgaatgttgaattctgttcttttcacttgaaattagatctcaggcatggatttcatgattatcactataatggctcttcagagtggacattgcatcttgtagggaaccaccctctccccagctgctggtgtggacgctcctccttgatggtgtgggtctgggcccctgaagggtggtgtcctgagtaaagatgttacagtagccatgcttatagctttgggcctggggctaggtggagactggcttcaaccctagagcttgctgtcttaaaataaattcttttttttttttttttgagatggagtctcgctctgttgcccaggctggagtgcagtggcgcgatctccgctcactgcaagctccgcctcccgggttcacaccattctcctgcctcagcatcccgcatagctgggactacaggcacccgcccccacgcccggctaattttttgtatttttttagtagaggcggggtttcaccatgttagccaggatggtctcaatcttctgacctcgtgatccactcgcctcagcctccaaagtgctgggataaaataaattcttagggccgggagcggtggctcacacctgtaatcccagcactttgagaggccgaggcgggcagatcacaaggtcagaagatcgagaccatggtgaaaccccgtctctactaaaaatacaaaaaattagctgggtgcagtggcgggcgcctgtagtcccagctactcgggaggctgaggcaggagaatggcatgaacccggaaggcggagcttgcagtgagccgagattgcgccagtgcactccagcctgggcgacagagtgagaccctgtctcataaataaataaataaataaataaataaataaattcttatacccacttgcattatttattattattattattaaacagggtcttgctgtgttgcccaggttggagtgcagtggcgtgatcatgacctcccagtctcgacctcccagtttcaattggtcctcccttctcagcctcctgagtagctgggactacaggtgtgcgctgcatgcctggctaattttttttttttttttttttttgagacagagtcttactctgttgcccaggctggagtgccgtggtgcaatctcggctcactgcaacccccggctcctggattaaagcaattctcctgcctcagcctcctgaatagctgcgattacaggcatgtgccgccacacctggctaatttttgtatttttagtagggacggggtttcaccatgttggtcaggctggtctcaaactcctgacctcgtgatccacctgccttggcctcccaaagtgctgggattacaggtgggagccaccgcgcctggcatgcctggctaatttttaaaaaatttttgtagcagccgggcgcggtggctcatgcctgtaatcctagcactttgggaggccaaggaggtcgggagttcgagaccagcctgaccaacatggagaaaccctgtctctactaaaactacaaaattagctgggcatggtggcacatgcctgtaatcccagctactcaggaggctgaggcaggagaattgcttgaatctaggaggcgggggttgcagtgagctgagatcgtgccacggcactccagcctgggcaaagagagtgaaactccgtctcaaaaaatttttgtttttgtttttgtagcgacagggtcttgttttgttgttgcctaggctggtactgaatttccagcctcaagcgatcctcctgcctcagcctcccaaagcgctgggagtacaggcgtgagtcactgtgcctggcctccacttgctttggctgcctttctctgtcttaggtaaccatacatttctccaggtaattaagaaaagattgcgcatgatgagtcccttttctggtatttctgggattgcccccaaaaccagacaagtgttcttaccttgacattttattaagactttaatgaacagaatgccgtttgccctcagtctgctggtccccctgcgaaggcccagggcttccttgtttgaaaagtcatccccttgtcgaggtctttgattccttttcaccacggcagtcatgccgagggtccacagagccaccccttccccatctcttcctcggcccctcaagacgcatctgtacccccggagatgtctctttgttttcttgggccacctctcctggccgtcactcaccctgctgactcattacttgtgcaacagtttcttctggaaccctcaggctcctgccacctaccctctgcagtccccgttttgttcctcttgcctcagtcttcctccccatcacccctctacctgttggtctccatctctgtctatggcacatccctgtgttatactctgatggctggataaaggttgagtgaaacgcatctacccctttggtgactggggtgcccattaatcagaagggatccaaggctggcgtagccttttcccgcatcctggggtatcgtcctgtggctcttccttgttggagtctgcagttttttgtttttttttttttaaattttttgagatggagtctcgctctgtcgcccaggctggagtgcagtggtgagatcccagctcactgcaacctccgcctcccgggttcaaccaattctcctgcttcagcctcccaagtagctgggactacaggcgcccgccaccatgcctggccaattttggtatttttagtagagacggggtttccctacattggccgggctggtctcgaactcttgacctcaggtgataggctcgcgtcggcctcccaaagtgctgagattacgggcatgagccaccaggcccggccgttgagattaccttcataagccaccaggcctggctgtagttggcagtttttgaccactggtctcgctccacgtgatctgtgatcttccccttggccccctggccctgccctgttcatctgctcacctttctcatgcatgcggtttgttcatagggtatgtaatggggtctaaccaggaaatggaaaccgcttgagcatttatttatttatttatttatttatttatttatttatttttcccaagacaaggtctcactctgtcacgcaagctgaagtgcagtggtgtgatcacagctcatggcagccttgaactcctgagctcaagcgatcctcccttctcagcctcccaagtagctcggactataggtgcacactatatgcctgcctaattttttcttttatttttgtagagacagggtcttgctttgttgcccaggctggtcctgaactcccaacctcaagcaatcctcctgcctcagcctcccaaagtactggagctacaggcatgtgccatcacgccttgctaatttttgtattttttgtgtgtgtgtaaagacaaggtcttactatgttgcccaggttggtcttgtactcctgggtttatgtgatcctcctgcctgggcctcccaaagtgctgggattacaggcgggagccacagtgcctggtccacttgagcatttagaacagaaggacttaaaggcggggaactagttacacagatgatgggagaggtgaaggccagacagggaacagagaggcaatcagcaggaaatcaaagtggtgtgggcttatacagccctctaaaggtatggatgcaatgattcatttagaatgagaaaataaataacagcaaattataaattataagcagctgttaaatatcacaaacatcactacatgcagaagagtaccagtcaactgtcagtcatatctccaaagttctatttctcccacatttttggcattacttcttcaatatgatgactttgtaatatcgttttctatttcgagaacagaaaactgatcaggctggacacagtggctcgtgcctgtaatcccagcactttgggaggccaaggcaggtggatcacttgaggccaggagttcaagaccggtccgggcagcgtggcgaaaccccgtctctactaaaaatacaaaaactagcagggcatggtggcatacacctgtagtcccagttacttaggaggctgaggtgggaggattgcttgagcccaggaggtcgaggctgcagtgagccgtgatcatgccactgcactccagcctgggtgagagagtgagaccatgtctcaaaaaaaaaaaaaaaacaacaaaaaaaaacataggctgggcgtggtggctcacgcctgtaattccagcactgtgggaggttgagatgggcggatcacttgaggtcaggagtttgaaaccagcctggtcaacatggtgaaaccccatctctaccaaaaacataaaaaattagccaggtgtgatgacgcacgcctgtaatcccagctacttgggaggctgaggcaggagaatggcttgaacccaggaggcagaggttgcagtgggccaagatcgtgccattgcactccagcctgggcaacagagtgagactccatctcaaaaataaataaataaataaagcgaatgaatctccttagttgatcaaattttgtttttatttttggtagttgggatgtatacaaaagtggcggtcaacatggagttggtggtgctgctacaattgttttgttcaagatacacaggaattctggtaaatcctgtttttttctttttttttaaatgtgattcccatcaagaaagaagtaggaaaatgggggagatttctaactgcatatgaggcatttgtgcatgtatttctgaccagagagacttttctgttttgactccacattgaaggaactgaatcctttgcttacaacttcacctctggtgatgggagtaattttccacagatttgcttctggacccgtgcatttcaaatcttgcttctctccactgcgcacgtttttccggcgccaggcaccgcaggatatgttcgtgtcttgtgatttttgattctgcgcggtaggtggaattggaacggtgagtggagcgagtattgctggaatccgtttccacaccgggatagcgagcagtaactgaactatacatggaaataaatgggaactacataaatataacccgaccaaagccaaactaaatatctttccagttcaacttctccttagcaggagcccccacgtggcagcaagcctccgtttccacctcacacaagagaaaatgtgacgggcaggaactcaagactggaaatgaacggggacgttaattgattgtagggaaaatattttccattttgtaaattttacaaaaaatgtttgaccctgtggacatgtggttagggcccttctcagtgccttgagagggaaccatgcaggtagagggagggttcttagcattgtgggggtgacctggagattggcagcagggtgccaccaccacccctaggtggggatgagagggaggaagtcctgtgaccagagtccaggggccagagtcacctgctgggagcccaaacaaaggtgggactctggcaggagctggaactacacagaggaccacctctcctgctggagaagctgtctgaggcagaggaggtggagagctcccgcgccctcccttgcttccacctcccaggttcctcccaagcctctcgttggttgaacccagcccaaagccagcaggcctggggacctggacacctgagccagcagaggtcggcgtttctcccacacaaaggagggcacaagaagtgggaggcacggagggggatcaggccaggacccacacaggatgtgcaaacaggagctcccctctcttcccaccccaaatggcatctgcagccggcctcacttccctgctgttagacaggaagaggaaccttgttcccggcaccagctgcccccaccgccccccaccccacggaggcccctttcctctctggcctttgcttgcaatcattggcgacgctgatggaccatatcttctggggagtttggtcatgaacatggtttcccatttgttgtggaccaaactgtgcccttccccttgaattcctgcgttgaagccctaactcccaatgcagctgtaattgaagatagggcttttagggaggtaattaaggttaaatgaagtcatagggcaggaccctaatctaataggattgatgtccttataagaagagggagagacaccagagatctctcctcccccctcacttgtaaacagaggaaaaatgacggaggacacagcagggaggtgggtacaagccaggaagaggggcctcgccgggaactaaccctgacggcaccttgatccgggactttgggcctctcaaactgagaaatacatgtctgttgtttaagtcactccctccacagtaatctggatggcagcctgagcttaccaaggcaccgtctgcatcagccagggctctccagggagacagccaataggagatggatggatggatggatggctagatagacagacaagcggacagagagagagagagacaggcagacacagacagacaggcagacaaatggctagatagacaagcagacagagagatagagacagacagacacaaacaggcaaacagacaggcagacaaatggatagatagatgatagatagccaggcaggcagatagacacagacaggcagacagacagacagacagatgataggttgggttcagtgactcttacctgtaataaccagcacattggtaggctgaggccggtggatcacttgaggccaggagtttgagaccagcctggctaacagggtgaaaccccatctctactaaaaatagaaaaattagctgggcgtggtggtgcatgtctgtaatcccagccactcgggaggctgaggcacgagaatcacttgaacctgggaggtggaggttgcagtgagctgagatcacgccactgcactccagcctaggcgacaaagtgagactccatctcaaaaagaaaaaaaagatagatagatgaatggatagatagctagatagatgacagatggatgataggtagatagataattgataaatagatataaatgaccgatggacaggcagacatagatacattgattaggtagatgatagatggatagatagaagatagatggtggatgggtgggtagataggcagatagacagttagaaagatagatgatagatagataggaaggaatttattaggggaattggctcataccattgtggaggccaagatgtaccacagaaggccgtccgcaagctggaggcccaggaaagccagtatcgtggctcagtccaagtctgcaggcctcaggactgggaagctgttgatgtaactcttagtttaaggccaaaggtttgagagcctggggaactgctggagaactgggagttctaagtccaagggcaggagaggaaggcatcccacctccaggagaaagagggaattcaccttttctctgcctttttgttgtctggcaatggaatggtgtcatccatattgagggaggatctttaccactcagcccaccaactcacatgcccatctcctccagaaacaccctcacagacacacccagaagcgatgcgttaccagccatcccttaatccagccaaactgacacctgccgtcagccaccacacaggctcagaagaatcgtggttgcatggtgatggtctccatcccgtctaaagaagttgaagatgaactgttggcacaagccatcgttctttcaggctccttccagtcgttcattcttttaaaaatgtattcattgagcacctgctgcatgccaggtgctgtgacaagcactggggcacagcagtgagcaaacaaggactcttgtttcttggagtttacatgcagtagaaggaaacagaatcaatgaattcatcagttctagaaactatcaaaataggactaagagctgtggtgagaattaagataaggtgattgcatagaaagtgactgatggctgctttggaatgagtggtgaggggtcacagagatgatgacagctgagttgagattgggaagacaggaaggagccagcagtgcaaggactaggctggaagcaagcttggtgcattccaggaacagcaaggaggccagaggggctgcagtagagcaggcgaggaggaggagggagacgcaggtcaaagaggagcctggggccagatggaggaccctccctccaaagctcagtcatttcctccttaaaggagaatgtgttacctccaaaagtcacatatgccagcacagtgtctggctcatcatatgccttcagtaggcggtgagcatggctgttcttgttattactacatcacaattactaggaataatggagtcaccaggctttgcatttacagcaatgtgagggagtcagcaagcttccctggggaacccatctcccctcactaagttcataagagcctgataaccaggtcaatgtagtgagagctatagctgcccagtgtactggactctttagccacgggccaggacactttcatctcagcagaaacctctaaggggactggggagtgtgctgtggatgtttctgggttactcagacctcctggggagccttccccaccgcagctgctgcagggagctcagctgcagtgatgaactgcggctcagccttgtttatgggaaaaccctacatgggagatgggacggtttcctgttggttctctcggcctcaggttgctttcacaagtgcagggattctcacctgggtgtgtgaatggggctcaggatgccccaagggtatgtggagatgggggtcagctgtcttctctgatgcctctgaacctcctccccctgcctttctgcatctcattgcttcctggcctctctcactttgggtgctttggaacaacatgcaatccaatacacaggctgactttattattttgttttgttttattttattttattttggaaacaaaggctctgtcattcagcctggagtgcagcggtgcaattgcaactcactgcagccttgaacttctgggctcaagtgattctctcgcctcagcctctcaaagtgctgggattacaggcatgagctgctgtgcctggcctaggctggctttaaaagctcctcactctctctgcatcctgatgatacctacctcctggagcaggctcccagccattggcttcggatactttgtagctattattggccagttgtggcatgtgaagctgaggctcaggagaagggcagtcctgtccaaggccacacggctcagtgctaacactcagacttcagtgtttttatctccctcctggtcgcttccacccttagtgcatctctggaggcccaagggagctaaaggccaggctttggtcagctaagaatttaaaaaagctgtctctgtgctcctctgtcaatccatcactccattatctcccccgacaatgaattcagtttgaatttcagataaacaaggattaatttttagtataagcatatcccacaacagacttgggatatacttatgcctaaaaatgattcattgtttgctggccttagtagctcatgcctacaatcccagtgctttgggaggctacagttggagaattgcttgagtccaggagttcaaggttacagtgagccatgatcatgccactgagctccagcttgggtgaagcagcaagatccttatctcttcaaaaaattgttgattgtttatctgaaatccaggtttaactgagcatcctgtattttatatgagaaccctatataggtgagacccagagtcccaatgcccactggtaagcctttgcagggaggctctgtgggtccttggctggcactgatgccctgtgatgagcagggccatctggcaaggtggacgcctgctgcccatgcaggcagagcaaggccctgggcaggtatgagctgatctcaccttccccagcctgggagccagatactgttggcagcttgccgtcaagagaggggctggtcaccaagagaggggcggcctccatgggccttctttggcttttggctctcccccagccctcctcctaccccaaacagaggccaacggcaccgcaccagaaccagtgtgctgcctcctttggttggcattttgtagttgggtagactgtttccttctcacaggagctggtggtgccccttccgcttcacagggaggatggctgagacccctgaccttgacacagggtgctgttctttttttgttttgagacagagtcttggtcttttcacccaggttggagtgcagtggcatgatgttggctcactgcagcctccacctcctgggttctagcaattcttctgcctcagcctcctgagtagctgagattacaggcgtgcaccaccactgagaacaatgccttctacagtgtttattctcctgtaggagcaagttcctaaggcaaggaggttgctcccctcatggatgaataaattgactttgatccacagccccacgtgtcagccttgagggtggggaaaggttgttctgtgtctaggcagggggtgggggcaaggccaggagggcctggtgcccagtgtacctcttcaggacacaactccaggtagcagaggccaaggacagaggggaggagaagagggaggtggccattatctccttatctcagcttcctttggagataagcttgagtattttagttgtccactaagtctggagataagtctggaatttaaacctttgactttgatccagcccttcacagctcctgtgagcaaactgagcctcagaaaaagggagtgaagcctgtgcatcctggacgcccccaccccaggctcaaaccgcccccaccccaggctcaaaccgcccccatcccagctcaaaccgcccccatcccaggctcaaagcgcccccatcccagctcaaagcgcccccatcccaggctcaaagtgcccccatcccaggctcaaagcgcccccaccccaggctcaaaccgcccccatcccagctcaaaccgcccccatcccagctcaaaccacccccaacacaggctcaaaccaccctcaacccaggctcaaagcacccccaccccaggctcaaagcatccccaccccaggctcaaagtgcccgcaacccaggcttaaagcgcccccaccccagctcaaaccgccctatcccaggctcaaaccgctcccaccccaggctcaaaccacccccatcctaggctcaaaccgcccccaccccaggctcaaagtgggaaggagccacagggaaacaaacgggggaggcacggatgaccaggatgagggtctccatgacccacctttccccaggggctatctcaagagctttttaaacttttattattttttaatagagatggggtcttgctgtgttgcccaggctgatctccaactcctagcctcaagccatcctcccacctcagcctcccaaactgctgaggttacaggtgtgagccactgcacctggcctctctcaggagtttcaagaaaaaaaatgggaatagatttgtgtgtgtgtgtgtgtgtgtgtgtgtgtgtgtgtgtgtgtgtgttttgagaaagagtttcgctctgtcacccaggctggagtgcaatggcacgatctcggctcactgcaacctccgcctctcgggctcaagtgcttcttctgcctcagcttcctgagtagctgggattacaaacatgcaggctgattttgtattttcattagagacggggtttcaccatgttggtcaggctgatctcgaactccggacctcagatgatttgcctgccttggcctctcaaagtgctgggattacaggcctgagccaccgtgcccggccaggaatagattcttttctgtagatgacttctgtcattattgaaaatggatgtttatgcacaattgaattgtcataacgcctcatcctaaaaagctcctttttgagaaaatgtgacttttgatagaggagagactgtccaggcctcattcattgtcagcacaaaggcagagcaggggtgtggcggtgtcaccctcctctgagacagccccatccctgctctgcccaggggttcagaagtctggtctattcgagcccacagaggggtttggagtggctgtcttacatcacaggtggggtctgtaaggatctgaaatgacctttgagaaggcgggtgtggtgggtgcatttcaatcattaaagtaacaacaatgatacatcaaatagtgtctgctcagattctgagtgcctgtttaaacatttccatcttgtgacttgccagattctagcataacaacccaggtaaaagaaaaaatagctgggcgtggtggcttgtgcctgtaatcccagcgtgaggccaaggcaggaggattgcttgagaccaggagtttgagaccagcctgggccacctgagaccccacctctgaaaataaacaaaccaataaaagaccttcatgctctatgtctttcttatatctaggttccccaaattatatgcattggggaaagtccattaagagaagcccctggccgggcgtggtggctcacgtctgtaatcccagcactttgggaggccaaggtgggaggatcacaaggtcaggagttcgagaccagcctggccaacatggtgaaaccccatctctactaaaaatacaaaaattagccgggcgtggtagtgcatgcttgtaatcccagctacgcaggaggttgaggcaggagaatcacttgaacctgggaggtagaggttgcagtgagccaagttggtgccactgcactccagcctgggcgacagaaaaagactccatctctaaataaataaataaagggagagaagcctctgggctcctagatacatgggtcagtgtccacccctgcaaagctgctgtgcccaaagaggggctgtacttggtggaattggggcaaaagagcagggagggcactgggcagttgacctggtctccactactggaaaggggctgtgctgctggtgccctgagctggttccacaaggaagacactgcacagggcgccctaagtttgctctttctgcctaggctcaccctttcctctccaggaccagggagccccgctcgtctcctgtcttcggcatctgctctctggcttgtgagcactgcatttctttctgcttggaacgccggcccatggtgggtccccggactcctgccttctgctgtcttttgccatatctcgtcaaagtgtgttttatttatttattgttattattttttgaaacagagtcttgctctgtcgcccaggctggagtgcaatggtgtgatctcggctcactgcaacctccgtctcctgggttcaagcgattctcctgccttggcctcccgagtagctgggattacaggcgaatgccaccacgcccggctaatttttgtatttttagtagagatggggtttccctatgttggtcaggctggtctcgaactgacctcgggtgactggcccacgtcagcctcccaaattgctgggattacaggcgtgagtcaccatgcctggccaactattataatattgatattataataatatcacagccagataacggtgactaacgcctgtaatccgaacactttgggaggctgaggcaggcagatcacctgaggtcagttcgagaccagcctggccaacgtggtgaaaccctgtctctaccgaatatacaaaaattagccggagcgtgatggcaggtgcctgtaatctcagctacttgggaggcggaggttgcggtgaactgagatcgtgccactgcagtccaacctgggtgacagagcaagactccatctcaaaagtagtaataataataataataataataatatcacttattgagttttaattttgtgccaggcactgtgctagtacttgcgccatgtgacctcattgactcggaacaacctatgagtaagcaccatctctgtccccaaggaagctgagactcaggaaatggaagtcatctcccagggcccacagcaagggcctggcgaggtctgcgttcaaattctgatcatctgactccaggctttcctgcctcctttgcctcccaaaaactcaaatactttcatctgggatgactccagacagctagatttcaattgtcttctctccttctgagtatgttttattttaaaatcacataaagataactcacttctcaactggagccacggaatcgttagatgtcttggagacttttctagctacctctttgctggactcagacacaggcctgaataattaggtccaaggagctgaactggagccgctcgtggccagaggtcccttcctgggaacagcagtggcggcagcggctgcgctgagcctggcaatttgttcaagagcaggggatgctcaggctgcgctcgcccccttcttatgaacggtttgctttgcgtcttctctgtgccaagggctgccaggcaccagatgcccattttaggaaatcagaaaaataaacagtgtaaataaaacaaaaactccacccaagaaatctgagacagatgctgttttccccaccgtttctccacccccatgctgggtttggagagagtgggccagcatgtttcctacggataagaggccctggggtatttaacctggatggaacctcttctattttccttttgcctggtgctagggggcagaaggcaggggtggtgtccatctggcccagggaggaggatagggcagcctttgtcgccggcatcccctgcagagatgtctcagccagaagtgactccatcctcaggaacgtgtgtcctgttctttgctgggcggcccctccttaccccccattgtttccacagtggggtgtgctagatttatgggcagagttctggttcactctcagccccggacagcagaatgtcccagtagtgcactgatggtgtgtgcgtggggatgtgtggaacaggggatagtgaccccgtgtgcgttatatgcagtgcggcttccagtcgggtgtgtgaagggggtgctcatggccatcgtggaagtgagctcagctggggctggagggtccaggctcactgtatgccactcagcagccttgggagtggggttcatcctcctccccgctcctctcccctcctggtcctgggcagcccaccggagctgcactctgggccatctctcctggtcttaaggaggctgtcatttctgggaggcagatgctggcccttccatccttgcttcctggagatctgcgccgaggtctgcctttctgtctggagggactggccaggaacccctgggttttcctggtggggtttttgttgcttagcagtgagcagagtgagtgggcaccaagaggaggatgctgggtgaggtcacggacatggctggggcaggctgggggtgctggaggtgaattccgcagctgtgcgaccttgggcagtttgcccagccctgggcctcgcttcctcctctatgaaatggggcgggagcacctgcctgctggggttgtgggttgggtgaatcggagctaaggtacagctcacagcctgccgtcagaccctcgcaagcagaagtgggtgtccctgctcagcgtcctccggtccctccttcaaggctcagctttgtcctcatctcctccatgaagcctccctggttactccaggagtcacgacccacaccctctttggagccttgtgtcacacgcatttctcacggtgttgctttccctggaggatgggttcaactaaaattggggcccatctgggggttccctccagcaccagagaagctcaggcttagtagagatgggtaccctgtcaatactagttccgcgaaggatacactgtgctcattctgctgccagttgctgagtctggtgtcctgtagttatggaacatgtgtacaggcctgggctgctggacacgaaggccagatgggcagttcactctgcctccgctctgagcctttagaaacaagctggctgcacccatttccatctggtcacagtttaggagtggggttgtggaatggatggaaggaaggatgagtgggtgggtgggggggtgggtgggtgggtggatggatggatggatgatgggtggatgggttgatggatgggtggattaggtggacaggtgaatggattggtgggtgggtgggtgggtgaagggctgaataggtgggttgggtggatgggtggatggatgtgtggaggggtggtggggtggatggggtccatgggtgaatggatggatggatgggtgaatggagtaaatgagtgggtggatggatggatggatgctgcaagagcctttctggagggttccagggaggaactggcatctttgaccagcagccagcatggtgatcagatacagggaggtgtctgggtctgcctgatcccttatctcactgttggtgggactgggctggttatgtgtccctgaagctctctgaagggtggctgtatggcattgcccaggggacatccccagagtgccgtgctctacagcaatagggtggccgcctgtgctcccagggccgctcctcctggcagcctttcgggtttgcttggcttagcacctcagcaaatctcctcgagttaggacttgcctgccatgagcctctccaacaagcagccccaggccaaggcctgtgtgtgggcagagggagcgcatgccgcgggaggctgcattaatctgaggttctgtttttgttccctcctggggcaaaaggtaaaaatagcctgtcccactccatccccaaatccagcccggctgcacccagccctgggagtgaagggggctgggtcaggactgcccgtgagttgtagaccctggtgtagggaaaccctgattcataagacgggtggacatggaggaaggaggagactccgtccagcagagacacgcttgggtgcagcccagcttggagtctgatggacgtgggctcacctgtgtgcaactctcattcactgtgtggccacagggaagtgacactctgtggagactcagattccttatctgcaaaacaggggtagtagggcttgggggaggatgtgtgtgaaggtttggcccagggcccctccagcagccagacagcagtggctgtcatccctccagcgtccagggttacctgggggagtagggcctctgtccccagatgggccccgtttctggctctggaactcacagcaggagcaaaggcgaggacattcctggtgttaatcatccacccggagggagagcgccagtggccttgtgtgacctttgccctttgtctctgtctttaggaggcacgcggacctccagtggccggctccggaggcttggtgactccagtggcccaggtaggtggctcgctccgctctggccccacccagctcatgggtgtgtttgtgctggggtcccttcattctggtctgggacctgcctccccacctggcttccctggatgagtggggccacttgcccatttcccagggagacgcagtctttgacggctttggactcaggtggcttccaggcctgtcgacgctgccctgctggagatgatccttgtgggggcaggggcagccacccccaggctcagggagcaagcccgtgtgtgcgggacagaggagagaacaggagatagatagggctggatgatttggtttgagatgctgaggggacagatgtgccatggacaggtggctttggccgtgagcctctcggtgttggttcagtatctgtgggctccctgcaaccttgcaggatggaagatgctccaggatagagcagatacgtccggtgttatctaggaggaaataagtgggcctctggcagtggtcactgtgctactccttgtgctttttccatgtgtttggaaattttccacactaaccagtagggaagggaaacagatgcacccatcagagctctggggctggccgtccaggacacgagttacagcttataggcttgaagggactctaccaacactgggtgcagcctgggcaagggagtgggacagagaggtcagggctctgcctccagcccttgccccccagggctgagtctgcgcgtcatcttctccccactgggtgtccctgatctcccctgcctgaccccagtgtggccatgctagtgcctctgtttctgggagcctacgttgttcttggctgtcacttccagcggccaggctgggacaggtgcccatctagtggcttttctatttggagaggatgatgggtcacagcaatgaatggacttacctcccctaggagacgaggagctctgagaagagcagagatggcgtggtcacctgtgcatatgtgctgggggccaactgggtgccagacccctggctgccatcatggtggcagacaggcagggactgtgccttcatgaattagccattctagaggagacaaagttaccaaaggacacggacccggagtcaaatccacacaaatagagcgcctgtggaccagggctgccttcagaacaaggtgagacagccgtcctgccaggacaaggcgcctacgggggcaagggcatgtgcccatctggagccgccacctccatgctctagaccagctccgtctaatagaaccttctgtgatggtgggtctgttctatacatctgcactccgccatcctgtatggtagccgcttagccgcctgggtctattgcacactcaaagtataaatgtttacgtttactttattcactcatttacttgcatagaattatttatttattttaaatggatttccacttatatctacgtgtggctagtggctatgaaactgaacagttccagaccacactggcacctgagacctcagaattctagacccaaagcctgcttctgatcctgagcttgcttctgtggggacagcacagacgcctcctaagtctgccttccagaggtggatgcagtgcccgtggactgtgcaccaccaggcctggacagtggagagggtggctttttacagggagtgggagtggaggggatgccgtgtccacattgagtgcatgtgaggccccttgcagtacaggatgggactgtatgtgggaagaggggggtgatgctctggctggaggcccctgggcagctgcatgattcagcgctgtggttaagaggggctccgcccatcgcagtcatgttgggcactaaccactggacagcccagccgctgctgtgtttctggggagcttttctccggctccgcatctgatctgcctctccatctccttccctctcattggccagcttctggtggaatgggtggggagggtcccccagttcttgtgggggttgcatcttgggaacctggcaccctgggctgcatggacacagcctcccccggcggttgcttccctctgctcagactggctggttctgtgctgtcagcacttggcagccacgatcacagctcagcttggaagcctaaggcataatttgctgaatcccaaagctgcaagctggtgatctgggtttgcgtgggactgcctgctgacacacggggtcctccctctgtgggcctctgtgggctctggcccgagacaccctttcctcatcttcttggcttctttctttctccctgcctcccttttgctaagaccctggtccaggcaggagttcattcctagacgccccagcatctccggcctccccatttgacactccccagacgactgtctgccatcccatcctcccagcccagcttctctgtagatccacatctggccaatctcctatgtctgggactcttgccctccccagaaggacgaaggctcttctcgaggttgtgtttgggactgggccagggatgacatttctggcaaaagcttaaatgacaccatgatcaacgctttggtcagctcacacactttctttccttttaaaaaaaaaatggaattcttagagctacaaaacaaaaatgtaaagaataaggtaataaaacacctgtgtactcaccatcccgcttaagaagtgagacattgcaggtgtagccgcagccctgggtgaccttctccatcctagccccactcctgctgcggtgcccgcccctctggattgggatctggccccgggcaggcacatctgtgctgggcagtggtgtgtctgagaagcctaggtctccttttttttttttttgagatagagtctcgctctatcgcccaggctggagtgcagtggcaccatctcggctcactgcaacctctgcctcctgggttcaagcgattcttctgcctcagcctcctcagtagccaggattacaggcacccgccaccatgtctggctaattttttttgtatttttagtagacacagggtttcaccatgttggtcaggctggtctcatacccctgacctcaggtgatccacctgccttggcctcccaaagtgctgggattataggtgtgagccaccgcatccggcctggtctcctcttgcatacggtcatcagcatcgtgtgactgagcagcctaggtctgtctcctcttgaatgccgtcatcagcatcacatccttggtgcctcactggagtcagtggctgccctgcctgtgcccacaacgtgacggcgtggagacttatccgtgtagatccacgaagccttggttcacttattttggcagctagcgagtgttcctctgtgtggggaggcagagtttgcccgtcccgtggcccactggtgacatcgccgaaggtcttctctgttactagtgctgccgggaacgtgtgtttccccaggtggatttggctgggctgtggagatgcgcttctcagcccttctagatgttaccaccacgccctcccgagtggccttctggtaggctctcccatgttcgctcattttctgtgcctcaggcagccgcctctctgactgagcgtccagcggacttttgccctgtttcccacggtgcacggagcatttcatctcagtggtgcctgagcttccctccctctggccctcagaccccggctgggatccttggagccaactcctctgcctgacatcccgtgtcgctaggtcctgctcttccatcttccaatacctctggggtgtgtggccttttccccagtgcccccatcatcccttctgtcctaggttgaaccgtgtcccccacaaactcatgtccaccaaaaacctcagaatgtgacctgggagttggagatggggtctttgcagatgtaagtagttaaggatcttgagatgaggtcattctggattagggtgggccctaaatccaacaactggtgtccttaaaagaagcagagaggccacagacacaccggggagagccacgtgaaggcaggagcagatgatggagtgacgcagccccaggccagggagcgtctgggaagaggcaaggaaggaccccccccccaccccaccccagagcctccctagggagtgtggccttgctgacaccttgattttggacctctggcctccagcatgggagagaacccgcttccattttttcaagccccacagctgtggtccattatggcagccacaggacactgatgcacctcccacctggccgctgtggatggacgaccccgcccgcaggaagtctccctcaagcactgcaggtgtctctgccctcacaggggacgcctgcacaagtaggtgtgaaaaaagggccctgtgggggcaaggcctgggctggtgctcgctgcctcccttcatcctatgctagttcccatgcctcttccggcaggagtgcctggctccacctggtgaatcagagccaaactctcctgacaattggctgtcacttatttaactgccaccatccccaggagacagaaaatgccagaagggtggggcctgtgcagtgcctcctcgctatttccccagggcaccgtgccacgttgcctcaatgcacagagtagctgctcaaagtgtgtcggacgaacaggtgccccatgcccagccatgcagacaaaagtgtgccacgtggagggagctggtcgtggaagagaccaccagcatcttggctgcccgaggaccttgcccctgggctcttgcaggcacccctagttcattacttcctctctcacccatagctacccactcttcctctatttctctgatatcagccttgccacccacccaggtttgcaagcaggaaatctcagagttgaccttgacctctgcctccccagcacccccaggtctcaacaggctgccaagatctcatcaactcgccctctgcatactgacccttggacaggctgccccggtcacggtcatgtcttggttgggcctccatcatccctccttggaccagcaggtgccatcctccccacccctgccctgctgtggctccttcccctccacggccaacatttagaggacgattaccacttccctccctgtgtgctggggaccgggtgataggatccctccacccgatcatttccattagacctgggccgggtcttcttactcatagagcccttagtttccgcccccaaagcctcgagggtggattcgtgctgccgcccagcctggccctgataccgctttccagcctggagccccctgcttctgcgctcctggctctgagtgctcgggccccccctggatgggttgccacttgtcctctggaaagcagggcttccatgctcctggacctcctagctgactcagtgactttgggccatcttgtcacaccccttctatcagcttggccttggttatttctgtgtcctccatagcctcggaccagagccacggcgggatgctttcctggtgcgtggcaggcagtcaggaaatattgctggactgaccttgataggagatgcttgggagaattgcccaaaaaactagcttaaaatgcaaatattggccttcttttgcgttggctaaagagtagcatttctccgtttgcctcccgggtaagaaattgatggcgaatgcaatgtctctagggaggagaagaaggtgacaaaaagggtctgtataacggggcacacgctaggcatttgtgactatttaagtttaaattataacataaatgcgaaactctttgccttggtagcccttccacattgcaagcgttcactgccacatgtggctgccatattgactacggcagatacagaacattgacatcattgcggagagttctatgggggggcgctggtttagatcatcttcacgttggatccacaaattcattgtttatccagtgaacggttactgggcacctactgagcaagcaggatgaaagacacccgctctcgggggagtcttccgttggctgcagagaagcttaaactcaggggacctggggcaaactctgcaagggcccttggcctctgcacccccagacctccctcgctctgcaggggcagtcgggggccccctctaggaatggagcgccagctccagctcctgtcaggctacagcccagatggttggctgagcacgagcatgtgagagtggaattgggcccaaccgggctgcttctccccgttgtcttggtttccttccacgctgacctggaaggactcctaaagcaacaggcctgcccaggcggtttgcaccagtaaaccctgcagcggccccaagggcagagatagctggattgtatttatttaggaacagccaaagtctgaggcacaataaaaagtggagaaagattccagagaggaatgcagctggcctcagcctgggaatccgtcttgcttgggaggctgtaggcgggccaggctggggccagcctggagggtcttggctggctctgctggcaggtacagtagcagggtcagcaggagggagtccaggacggagctccttcatttttaattcagggaagcaaacttcagtggttgagtctgaggatgagcaggaaatgaatggaaaagtcttttttttttcttttttctttctaggcagggtctttctctgtcccccaggctggagtgcagtggcacaattatagctcactgcagcctcaacctgccaggctcaagggatcctcctgccttagcctcctaagtagctgggactacagttgtgcgccaccatgactggctaattcttaaaagaaatgttttcaggctaggcatggtgacccatgcctgtaatcccagtacttttggagccgaggtgggaggatcacttgagctcaggtgctccagaccagcctgggcaacatgacgagaccccgtcttgactaaaaatacaaaaagttagctgggcgtggtggtacagccctgtagttccagctacccgggaagctgaggctgcagtgagttgtgatcacgtcactgtcctccagcctgggcaaagggagtaaggccctgtttcaaaaaaaaaaattttttttttttttgaggtggagtcttgctctgttgcccaggctggagtgcagtggcatgatcttggctcactgcaatctctgcctcccaggttcaagtgattctcctgcctcagcctcccaagtagctgggattacaggcatgagccactgtgcctggactttttttttttttttttttttttgtagagatgggatttctctatgttgcccaggctggtcttgaactcttggcctcaagtgatcctcccactttggcctcccaaagtgttggaattacaggtgtgagccaccacacccagcaggaaaagtcactttttaaagcgagaggttgtgcgtcctctatagcttggcgctcatcagcatggaggatttactggaacgtgtgttaggtgaggggacatggaagatggcagcaaatccgagcccagagcatcagaaagcatgctttcagccaaagatgcgttctctccacctccgcgcagcacccttccccagtgtgtactcctggagcaaggtggggccgatcctacgaagaccctttcccgaaggcccctgctgcccacatcagtgtcacctggaccgcctgctcccttttctggatggctggaccagccccagggcctcctggcctggtgtggggagcacagtccaccctggggaatgcctggtatgtgtcccctccccactgggtaccaggggatgaagctgtgcttcgtggaaggggacagaggcgctggtgcccaggatggtgcacctggggcggctgaactggacctggctcctactgggcccctgtggagcccagattgttgtgagaaggggtggggaaaggcaggtgatccgcacctttcacttttgtttcacatgggaacaggggcttatcctgcacacatattcagtttggagtatgaatttccatgaagaggaaaatctctattaggctctgatgtcaggattgtccgtgagggccgggccgtgttctggggcaaggacaggagtggagggggcaaccagggaaggcttcctaatggaggaggcatttgatagcatcttgaaaaagaagcagttcctaggccaagccagagactgaagaatgaccacctaacttcttttttttttttttgagatggaatctcgcgctgtcgcccaggctggagtgcagtggcgtgatctaggctcactgcaacctccacctcccaggttcaagcaattctcctgcctcagccttctgaatagctgggattacaggcatgcgccaccatgcccagctaatttttgtatttttagtagagacggggtttcaccatgttggtcaggctggtctggaacccctgaccttgtgatccacctgcctcggcctcccaaagtgctgggattacaggcatgagccactgcacccggccacgaccacctaacttctttctacaagatgccccctggctgacgcaaagcaggttgagtgagtgtgacacttccttcctgtctgtgggttccggcctttccagagcccggccagtgctattggagacaaagtggccttcgctcttccttcccgccctgccaggcccagcctgtgccgctgagccccactttgcaattaagaggagctgtgaaccagtgatgctgatgtcgcagaaaagtggccaggggtctatggggggtgaaggacagggatgccgccctgagaactgtctggaaggggcttttgggtaacagtgcccactccagggtgtgggcaggctggggtggctgggagctgggctcataggctggcacaaccagagtttcccaaagccgtgggcctgagggccctgccttcctgggacagcaacctttggtccaatttgggaaaaggtgggttaaaccaagcccggctccctcactgtaggattactcagtgcgtttagtatgcaaatgtgcctctgaatctaagacaggaccacagaaacctcttcagtgttcctctggagggagggaccgcgggggatccaccgcaggggcctgggtctgcactggcctggtgaagtgcccccttagtgcttacaccatgcgcggtgagaggttggccctcgcctcccccaccctctgctggccttacctcaccacctctgcactcgcctcccagccggctcatgactaactcctgcctcttcagagccaatcggtgctgccaggttttccatttcaagtgatcccccgcctgggccaaaatgtttggattttcaggcacggaggggagatggacctcaggccaaaccatgctgggtaaaactgagggtcaaggctgtgctcagcaagtgctccagccctggccgtcaaacccatagtgtgcacagcgtgcaggaggtggctgggtgaatgaactcagtcatagcccggcccctcactcggggctgttcccaagttcccaccgccagccaggctgggtcagagcctcgtggggccttcctgggcttccctgccccacagcaggagttcgtatggagagtctcgagtgaggttaatgggttttcttcctcttctttttttttttttttaatttgagacagggtctcactctttttacccagccagggtgcagtagtgcaattatagctcacagcagcctcgaactcctggcttcaagcaatccttccgccgcagcctcccaaagtgctgagattacaggcacgtgccaccttgcccagctggggtttctgctttttactttttctcttgtttctaaactcaatacaaagaaagatattacatttataatcagaaaaaccaacaaggaatattatttcaaaattggaaaagggattaaagaaacaaaccaagaaacctctgcgattcctgcccatcggagtcagtggttgttagtggttggcttaacacaatgttttaggaagaaatagaataacagaaagcaactccagtgagctgagccctggctccgtctgtggcgctgcatcagtttcctgcagctgctgtaacgagtggccacaagctggctgggtcacaacaacgcccagccatcctctcacagctctgcaggccacacatccgagatcagggtcaccaggctgaaatcagggtgtccactgggcatagccctctggaggctctagggcaggggttcccagccccgtgtgtcctattaggaactggcctgcacagcaggaggtgagtgactggcaagcgagcgaagcttcatctgtatttacagtcactccccattgctcgcattactgcccaagctctgcctcctgtctgatcagccatggcattggattcttataggagagtgaaccgtattgtgaacggcacatgtgagggatctaggttgcgtgcttcttatgagaatctgatgcctgatgatctgtcaccgtctcccatcaccaccagatgggaccgtctggttgcaggaaaataagctcagggctccaactgattctacattatggtgagttgtataattatctcattatatattataataataatagaaataaagtgcacaatcaatacaacgtgcttgtggccgggtgcagtggctcacacctgtaatcccagagtgaaactctgtctcaaaaaataaaaaataaaggccaggcacagtggcttatgcctgtaatcccagcactttgggaggccaaggctggcggatcacgaggtcaggagttcaagatcagcctggccaatatggtgaaaccccgtttctactaaaaatacaaaaattagccggacacggtggcaggcgtctgtagtcccagcttcttgggaggctgaggcagaagaattgcttgaacccaggtggcggaggttgcagtgaactgagatagtgccactgtactccagcctgggtggcagagcgagactctgtctcaataaaataaaataaaataaaataataaatataatacacttgaatcatctcaaaaccatctccccactccctggtctgtggaaaaattgtcttccctgaaaccgatcccaggtgccaaaaaggttgggggccactgccttcatcgcctgcccctttgagcctctggtggctgtgggtgtcccttggcttgtggctgcatggcccttaccttcaacaccagcatctacagatctctccgggccccatctccacttggccatccctgtctgtgtcaaatctccctctgcccccgtcttgtatgagcaccgagactgcctttagggaccacctagaccatccagggtgctctcgccacagcaagatctgcaactgaatcacagatgcaaaaactcttgttccaaacaaggtcccatttgcaggtctagggattaggacatgctatccctggggccattattcagccttctctcgtgactatgatccctcccttcctccccagcctcccacctcggctgagatgctgtccccacctccctcactgtctggctgcctgtggggctgtcctccaggctctttgggaggaggtggttgcttgatgtctcccagaaggctgggaatggtcctccccaccccccaggaagatgtcctttctgccaaggagattgcatttggggtcctatcccaggcagagagcggacgggactgtggcctgaagtggcacttcagggcctttggctctgtcatctagccgagggctgtgcatgggcctcacctggtcacaggtaactcacctggctctgtggggcagggattgtaaactcagaggcctgcggggtgtgtcgaggtagaggggtgcaaatattgtaaatttgttgggggccttggggagcagcacagactgaaaagtgttttgtctgaagagcagaactgtcttataccagccctgtgcggccaggcaggaaggcttccgtggtgcggccacgcgtcctccctttctcaacagaagctgacagtctggagttttcagagagattgcctgagttctcagccttggcacaaacacacattctctttaaacaggcttgggccaacagaaccagcctccgtgtctcgggtttgaatgaacccttgaggtgaagcttaaagacagagaggatgcccctgattcccaccccagggacccacattgtaaacccccacctgctctgctgagcccttggcctcagcatggaccctgaccatgtgctggtggggaccccccaggtaagtaagcagcctctgaggaccccggatgaacagtggggaacagcactgatcccccagtggggccccgagttcccggagaggaagactcgctccctcccaggggacggctagagactcactgactcatgcgtgtgtggtaggaatcttccaggaagtccccgtcccgttcgccctctctgcctgggcggggacggcaactgcctctgtcactgcagactaatgggacggaggggggtgacttctcagggttcctcctgggcaggtgctccggaaccttttctcagcacgctggcctggggcacggccgttcctcctgcccagccacgttggggtacagggtgaagaagggctggggccagcccaggacagaggaaggcgaggcaggcacgcaggaactgggctttttaaacccttaagcccaaggaaatcgtagcatcgcgggacagggaaaatgaaagactttggaagtcgtcaggaatttgactctgtgagttggtttccaagagtctaagttaagcatctccaagtggatattaaaaaggagcagcaagcctcggggcggcgggggctggaggaggtggagagaggaggctgccggaagccgcactcgggacctctgcagccaccgaccagaccgggcggccgggactctgggactctcgcaggcagacccggtggtctgccggactcctcggggcccacttcgggccctctctcctgcctcctatttttggatttctctcctttgctccctttttcctcccgttttgaagagacaatgctacttcagtttggagcacaaacatatgatcagcacatggaaatgtggtaattcggatgcattcgtgattgcaacagattgaagaaattagaccagacaaagagtgtttttagaggaggaggaggaggaggaggaggctgagagagggagggcgacgggggtgagaaaggggaggccgcctctgagcgggacgccgggactcccgccgctgctaaatatatccgtaggaatggagagggaccggatctcaggtacgcagacagccccctccccatcggccgccccccactgccctggactcggggctttatttatgcctgggggaataagcatgcaaagggcgcttttgctcatttttcacagaaatatttcttttctttttgacggttccaagctcgtgggatgaactccgtctcagaagctaagctctcctgagtctggcttttatttaaactcggctctcctctctcctggctacttccctttcattttccagtgtgccattcttgcatgtcatggccactgtcaatgctgaggctgttggcgccgaaaccttgggagggtgtgggggacctgcccccctggctcgggtctggggcggcggcgcttggacctggctggtggttggtttgtccactgtgtggtttgttttttgcttccagccaaagtctgtcttcaaggctgcctcggtctcctacctaaaatagcatttctgtgccttcctggcagttgattatagagggggaagctcccggcgctcagaggagcctggcgtgtgtgtgcacgtgtgtgtgcatgtgtgtgcgtgtgtccattcacgctggcagcccccttgccgcaggcacagacccatcagggcgtgaacaggcaaatgaagagaaagggggctcccctgcctttagttcaccccagctttccaggccctccctcccaggcccagcctccttggtcccttcactcacatgcggtgccgtggctgccatctcacgtggccagcgccgtcatcggtaattagcagtgatgacagtttctgccgctcatgccgccctctgagcccagcgctgggagacatggggtggctgagccaagctccaggctttgggtattctgaagtgacctacgggccatggagcgggaggtcgctaagagtgtcaacccctacgtgccttgggccctggtctgttggttgccactatgtgtgtgttggggggtccctgagaggcctgagagagggaggcccatctcggtggctcctctctaggacgtgtggtcccctccaccactgctcccagggccacatctttttttttttttttctttgagacggagtctggctctgttgcccaggctggagtgcagtggcgcgatctcagctcactgcaagctccgcctccctagttcatgccattctcctgcctcagcctcccaagcagctgggactataggcgcccgccatatttttttgtatttttagtagagatggggtttcaccgtgtcaaccaggatggtctcgatctcctgatctcgtgatccgcccgcctcagcctcccaaagtgctgggattacaggcgtgagccacggcgcccggcctcagggccacatcttgattgtcacgttgggactggtggagcgggtgtgtgttgtgccgctgagcacacccagtcgggcacagcaggcggacctcaggagggggccaggggagacggcagaaggcttgggtggcagtgaaactgcatcttatctgtttgagctcgggggctcaggcccgctgggacgggtgggtgtggagcccagcgtcctgctctccgcccagcaggagccgcagggcagggagcgctgagagggaccttcgtcaggcttgcacagtggagccgtcctcggagtgaccaccccaccaggcagcctgggcagaccacagtgggtcccctgcctcctgggccaccagccccaggaggacgtcactccacccgcctggctggcaggggcctcggggagcctcgggttcggccttcactttatagatgatctagccgaggcccagatgggtgaccagcaggggatctgagagctgagcagagaggcgtgggtttgggggtggtgctccctggggagctggaagtgatggcaccctcccaggctcacaaaacacgggcttttcatgaactgaacaaaacactctttgaaagcagccagtgctgtgccccagagaccactctgatccctgctgcccttggctgaggacagcacagccagggatgaagcggggacctcccctcgggctgtgccttgatgaaagatgctttctacaaaatcccattcggatgtgttttcatgtaagaaaacgtacatttttagaaactcagttgtaaactggctgccttccgaatgaacacgacagtcccggagctgtttcccttaatgaggttctcgtcctgggcaaactttagcgctggtctttaattgtcactgaactcccgcacagtccctggggaagtgacttccttcctgtccctgctgggtggccttgagcaagccacttggcagctctgggccgcagttccgtcatctgcaaggtgaggggtgggagcggcacggcccctaggcagcgcccccacctcctgcgggtttctgcgcgtgtcctgagttttgtgggcgcctcttccctcactgaggggctcttcttctctgcagggcatggctcacgccgcgttgtcaggctgcaagccactgcgagagctgctctgatccccaagcatgctctggcctgaggaggagccatggggaggacgctgtgcctgtgtgacagaggcctgcccggcagatgccggcccgctgacttccagacgtggctgtgggtgcctcatgccccactgggctggcgtgtgaggcgtgtccagctcaggctgccctacagctgcccaggaagggtttgtgggagggggtggtcctaccctggtgagtccacggtggtctgccagccccagggaaggcttaggagccccaagacctgccctcttgtccctccctcggcagtgtctggctccggtctggtttgtgaacgggggcctgggtactctcccgccctccctgggggctgtggccttcccctgggaaggtgctggagggtttgtcagcagggccggcatgagtcatggagtggtgactggccgctgaggcatggaaggccactccttccagccaagggtcggagctttttttttgttctggaacggctttgtggcttttacaaattaagcagttttatcttgttccaagagcttgtatttcagcagggagagagtctccaagaagggaactttccactggggagctctgttgggctgggaggctaggaacaggccacgagggagggctgcaggcaggggaagtggccgtctgtgcatggtcatgaatgcaggcccggggtcctggagggggcttggccacgctgtcgctggacgtctgtccccaccagggtccatctgatgcagtacggcacagggtaaagcccagctcctcttacggggttcctgggtcatcagtgggcggggaaccgaggcctcctggagggcggtgcctcagccctcacccctccctcctgtccctcgctgtgctgtccccgatggcctctgccatcccctgggagttcttacccctggacgctcggtgcctgtccggtctcaacctctccagctctgcttttccatctccgaggtgagaggcctggcctgacgcgctctgcacccgcttcctgcccagccccgtgggaactctggtccctgtagtggtttcctggggctgccatcaccaagtgccacaaactgggtggctcaaaacaccagacatttcttctctcgccgttctggaggccagaagtccgaaatcacggcatcagcaggcctggttctttccggaggctccgagggggagcctgcttctcgcctctggcagcttctggcggctcccgaaacccttggcgttccttggctcgtggccacaccactcgacctctgcctccgttgtcacggggcctccttctgtgccctaaatctccccctgtctgtctctcatacggacagtctttctcggatttagggcccactgggtaacccaaaatggtcccatctcaagatccttaacttcataacgtctgcaaagaccctttttccaaataggccatgttcataggctctggggtggatgtaaattttaggggccacctttcatccccctgttgtccccgtgtgtctggatgcacagcatggttccatgtcccagactccttgctggacccctctggccctttggggtggcctttggccttttccactcgtttctgtgctcctggtgaggtgtcggggtcgggcttagcccctgcaggaattctggggacagcatggagccggcaactccccaccaggcgtcttcctacctgcccagagctcatggttgtgaggggtctctccttgtggttttgatttgcaattccccagtggttagtgatgttgagcatcttttcgtgtttattgctcatttgcacatattcttgcagaaatgtctgtccaagtcctttacctgtgtttgatttggatgattgttgttgctgagtgttaggagatctgtagattaatatccagatactaatcccatatctgacctatgatttgctgccattccatggattgccttctccccacgttgttagtgccctttgatatgcaatttttttttttttttttgagatggagtctgactctgttgcccaggctggagtgcagtggcatgatcttggctcactgcaacctccgcctccctggttccagcgattttcctgcctcagcctcctgagtagttgggattacaggcacccgccaccacacccagctaatttttgtatttttagtagagacggggtttcactgtgttgactaagttggtctcgaactcctgacctcaagtaatccacccgtctcggcctcccaaagtgccggagttacaggcgtgagtcaccgcacccaggctgatatgcaaatattttaaacttctatgacgttccactttatctatttgttcttctgttgcctgtgcttttggcgccatatccaagaaatcattgccaaatgcaacgtcaggaagcttttcccctgtgttttcttctaagagttttgtggttttagctcttgagtttaggtctttgatgcaagttgagttgatttttgcatgtggtgtaagggctggtccagcctcatgctctgggctcttgattcacttctcttcttttctcacgcccagctggttccgctgggtggcggggaggagtggggaagtcccgggctgggcctgcactcgatcatcccctctcaggccagccagggagtctcagctcctgcccaggacctggctggacgtgctccctaccgggaaagcctgggccgtctttctaggctgatggcagggccagcccggggcgtcctgaggcctgccctgcggacatgccccttgttctaggtggtgtggctgcccggcctgcgtgtgagaccagctgtctgtgcttcaggccatggaggctgagtgtttccagcctgtccccttgctcggctctccctctggggaagcccctgcagcccattctctgcctccgcttctgccatctgtgcctttgtctgcttcctgtttggaggtggtcatccctggggccacccctcatgatctggacacaagtctccatcctgaagccaccacccaaacccctgtgcctcaaacccctcccacccaccacatgggtttccactgtgaccaactcagcagctgatgaagcttcccttggggctctcctagcaacggggagctggctttcccggaggcctggcctctccctaagtggaagtggggcgtgagggtgtcagcctttttctgctgcctggtgctctaggttggcttgtcacccctggaagcacttgccatccttatacagcaccccacacccacctccccgcctcctaccccttcttccaaggggtcatctctgcttccctccccacccaacctcacccatgtggtccgcccagcaacctttgacccccaacatgacaaaataaacctcccttgccggtcactcattcattcattcagcattgggtgctccctgtggacttggcgctggggtcccgtggaggacaaagccagacacagtccttgccctcatgggactgcacaagtgcaagaccacatcagtaaacgtgaaacacaggaagtgacaggtgtgacaaaggggaccagtggcaggacagaacctgcggttcgtaggaccaggtcaggagggctgcctcggggggacaccttcgggctgagcgcagaaggatgaggggagtaaaccaggctcaaacccagcaggcagaggcgatcgctgcaggcaaccggcaatgtgttcaaaggccctggggcgcggggggctgaggccggcagcacggcaggaagtaagactggggttgaaagagactgactgtcatgttgtgaaatatacacttggttttcatctccatttcctggcacacaactcctaaaatccttggaatctccaaagtgatgtctttttggatgctcatgattgacagaccagctggcagcttcaggatggttcccagggaagaccaggtagaatcacaaggttcagcaccaccccgcaacctccaggtaggggagaggggctgaaggttaagcagatcatcagcggccaatgattgaatcaatcatgccttcgtaatgaggcctccgtgaacactcagaaggatggggttccgggagcttctggatggatgagcatgtggaggctcctggagggtggagcgcctggggagcacatggaagctctgcgtccctcccccataccttgccctacacatctcttcccctgtatcctttgtaatatcctttataataaactagtaaattccatgagccccaggaacatgtgtaaaagaaaaaaaaaagaataaaccatagctgctgtagcaagttaatcctaccagcactggctctcatctgccgaccttacctctggcaatgcctccctctcctgggctcctgggacccctccggccccaccacccctcctgtagtggtctcgctggctgctgccctcaggttagtttatttttacccggcctgctcccaccaggggctgaggcctccttgctcactccagcttcctggcccgtctcttgctctgggcacccccccactccgaacggccagagcttctgaagccgctcgctgtgtgcccccgcctggccccatgcatcccgcacggtgctccccagggtctcccactggcaagggcattggcatagattctggggctgccttggttcaagcccaccctgacttggagcctgagggtccctgagggggtcctgaaggccagggcaggcaaggctggcatgctctgggcagtgggggctgggtatgggaggggatcgtgggtggggagattcctcttaaccagcggcccacgtttggagactgatttgggctccaggctacgccttgaaattgggacagagagtggcgcagatctcagcccggagactccctctgcctgtggacgccctcatacctccatccgtggagccaccctcctctttttttttctaaatggggaaactctgacttgaacactgaataaacaacacaccctcgaaatcagcgaagaggcactggctctgaaactttgccatgaaagcttgaaaatgctctttggaccgatttgctggaacagacgggtgtgatggggctgcggggtttcaggtggcaggaggcgtccccgtgcctagggcatcccgatgctcagagtttccccgtgcccagtgtgtccctgtatccagggcatccccatgcccagggtgtccccgtgcctagtgtgtccctgtatccagggcatccccatgcccagggtttccccgtgcccagggtgtccctgtatccagagcatccccatgcccagggtgtccccgtacccagggtgtccccgttcccagggcgtcctgtgcccagggtgtccccgtgcccagtgtgtccctgtatccagggcgtccccatgcccagggtgtccccatgcccaggcactgcctctccccactttcctaatctccctccaccaacaggtgtcagctgtgaaatgcctgctgtgtgtgtcctttggttgagttcatcttgtgctcttaagttcctgttagacacaggcaggctgctttagttcttctggcaaatgttttgttgttgttgtttgatacggggtctcactccgtcacccaggctggagtgcagtggcgccatctcgcctcactgcaacctccgcctcccaggttcaagcgattctcctgcctcagcctcccaaatagctgggatgacaggcgtccgccaccatgcctggttaatttttgtatttttagtagagatggggtttcaccatgttggtcaggctggtcccgatctcctgacctcaagtgatccacccagcttggcctcccaaagtgctgggattacaggcatgagccaccgtgcctggcccgtctggtgaatgtttattgaggcctactatgtgcagcccctctcttaggtgcttggcctgtaatgaggagcaacaaagacacagtcgctggtcgcttgttacttaacagttggaactgagaggcagtccacaaatgagcaaatccataggtggttttagatgaggactgtgaagaagctaagaacaggttgctgggggtgcatatctgtgtgtgtggcgaggggattaatggaagccctttctgagtggtgacactgagctgaagctgtaatgaccagaaggacccagccaggccaaaatccaagggaagagcaacctggcaaaggaaacagcaggtgtgaaggcccgaggctggagcctggggaaggtgggagtggctggagtgtgttttcagagacgggccatggtgacaccaatgcgacaggcagggccaggtcgtgccgggccttggaggccctggtgagggcttgattttattctcactatggtgggacctcagtgccctgtggctgctgagaatggccaggggcaggcagggaggcctgctagggaggaggctgctgcaggccctgcagctggagagggaggatcaggatctctttagagaggaagttggagagggaggatctctttgattgctggatggacccacctgcctggctgcccccgtcagcatccagcagaggccactggatgctgacaggtggccggccctgcccagccttgcactgccctgtgctgccctggtggctgccggctttaggaggagcgcttttggtgtctgagcccagtggtcctggctgtggtttggtacacttggccgtgggtgaggccaaggtggtttggatcctgggaaggttgggtacctggcagcctcaaggcaggagctggggtgttggaggaggaagcacgctcatccctcgttccttcctgtttcgtgggatgctgagtctctgggcagggacatggtgagccctggtgtgatgcacttaacacctgctggtgcccccatccccaagcaggaaccctggtgcctggtgcctgaggactgctgtccaccgtcccaccatccttcaggtttcttcccagcctctgactcggggcaaggttcagatatccagaacattcttggctggctcttggagctggggtgaggcagaacctccctcccatatttacagcaccagccaaggcttcggggtttggacaccatccctgggaggggtgagcaggacaagtgaggtctccagacttggggtggcttcggactggccaggcaggtgggtgggggctgcagtccatgcccccgctccaggcaacacagtcgagctgcagcccccgctccatccccagctggggctccctgtgctcaccttctgcttccttcctctccctcggaatggggggtggacactccaagactagcctcccagccactctccctgcctcctgcctcctctccttcgggacagacccctgtgatcgctgggtgttcctgatgctctgtcccctctgcgtcctgtgccgtgggtgagagagggcttcggggggacttccccctcttggagcacctgctgctccgggtgcctctgggggcgggcccccacctcacattgtggagctggtgtaggaaggaaggtgccgggagccagctccaattcacgtgctggctgtggccctcaaggtgtggatggcaggaggtggtgagacagggactcattgatcatgggactgacaccccctcatgttgatgtgggccctgagccataatctcaccagctcctgagttttggcgctgctcttggcgatggcgtggactcagccaggctctcgggcagcctttcctggattcttcctccgttctcccctgggcagtgtttctgttcacctggaaaggatgggtaggacttggagacaacagggattcaaagaagtcgggagtgggggcacctgtgcagctcaccctgcagaacagacaatttggttaaagcctaaagcctgctgtcaggagcctcgcttgcctctcagagagcacatggcttgaccatcacggggactgggggagaggcacaggcatgcctgtccggcagcagaagggaaccccgggcctgggcctctccattctgtggcgttgtctttcctcagagttgcactgtctccttcactgtccctgcctggccccagtgctcatgtggcttgtggccctcagtctgggcttggtctcccgcaattcaccctgcccagccccacacagcttgtccctccagctgggaatcggagctcacctggagtcccaggcagcagattcgatgcagtgatgcagggctgtcagccatgccagcaggccctgctgctcacagagggatgggtattgctgttgacaataattaaagaactacggcttcaggctgggtacagtggctcacacctgcaatcccagaactttgggaggccgaggcaggagaatcaattgaatccaggagttccagaccaggctgggcaacatagcaaggctttgtctttacaaaaaataaaaaataataataataataaaaactacagcttcagaatgattgacttcagcatgtttataaagtcaagggtcttcagtgtcctgggcctatgtcactgcgtcagagggagagaggaagaggctggggtgatgggcactggggcttatgctcctcctggaatgggtggtcttggactgtgcctgtgtgatatgtttgtcgagcgggggcggtgtccactgaggactggatgttgaggtgtgggtggggggaggttatgaagcactgggcatttcccgtgcaccagtgccccgagattgcagagaggggacccgcccagcctgggcagggaggcgggtggcagcgaggaaggggagaggaactcgggtgcagaaagcctttcctccagcaggtggcgccgcaagctctcgagagtccagctcctgcggggtttgcattttcactgaatttgtgggcagaggctgcctgggtgtagtttccgccaactgtgactgctcactgcgggcgaggggaagtggagtgcagagaatgcaccggagggcagatgaccagcccccgcacaggcacgggggtgcctccttccccgcacaggcacggggggcccgagcccttggggttcctgtcctaactgggcggggaaagggagggttggaagctgagttagggggaaagggggtggtctcctgccatctcttttattttatttttcctatttttggttgataggtttcaatcttttttacatttttccaactttttgccgtaaaacttttcaaacatagaaaagatgaaagagggctgagtgtggtggctcatgactgtaatcccagcactttgggaggttgaggtaggaggatcacttgagcccaggagttcaagaccagcccgggcaatatagtgagatcccatctctataaaggatacaaaaaattagtcaggcatggtggtgcaggcttggagtcccagctactcggaaggttgaggtgagaggattgcttgaacctgggaggttgaggctgcagtgagctgggattgtgccaatgcactccagcctgggcgacagaacaaaaccctgtctcaaaaacaaaacaaaacaaaaccacaaaaaagaaaccatgaaagattctaaagtaaacacccatgcacctaccacctagattccacagcaaccattttgctgtttgcttcaccacaaatccctctggccaccagcatccacgctggttttgatgcacttaaaataagctgcagaaatcagcacacaacatcctgtcaacacctcagtttgcatttcattaactagagtccggcatttgtctgtgattatttttgtttttctttgaagtaaaatgtatataccctgagatgcacaggtgtgaaacgttccgttctttgaattttaacaaaggtatccacgtgtatcccagcctgaccagaacatagaacatcactatcaccccagtaagttcctcatgcccctccaggtgcatcacagtccccaccttccccagggcaaccacaattgtgctttttttccaccacgaaataattttgccagtttgagtgtttcttagagctacccatgttgctgcaggtgccagcgatttgttctgttttattgctgagtaacgtccactgtgtgaacattctgtgggtttttagtcattctcttgttgaaagacccctggctgtttccatctggaggctcttatgagtaaacctgttacgctggttcttcttgtacaagtttttctgtgcatatgggcgttcatttattctgtagaaacacctagagtaggtatagggtaggtatacatttagttttataagaaactgccagatcttttcccaaagtggcccttccatttcacactcccaccagcaatggatacgagttctagttgctccacatcctggccaacatttggtgctgtcactctgtgaaatcttagtcattctggtgggcgtgtagtggtatcatctcattatggctttaatttgctttggcctgatgactaatgcggttgagcacattttcatgattggctcttcatatatttttcctttgtgaaatgtcttttcaaatctgttgctcattttaaaattgggttgcttgactttttcttctggatactgatcttttgtcagatacgtgttttacaaatattttattccagtctgtggcttgcctgttcattttctttcctttttcaagaacaaggtctcgctgtattgcccaagcaggtctgaaactcctgggctcaagctgtcctcctgcctctgcctccccaagagccggttttacaggcatgagccaccatgcccggcctgttcattttcttagtggtattttccaataagcaaaagtgtgtcactttaatttttatgaagtctaatttaacaaactcctttctttgtggttctctctctgtgttctttgtaagaaacctttgcctaccctgccaaattgcaaagatatttatgttttcctttagaaggcttagagttatatagcttttatgaattaacttttgcatatggtgtgaggtagagggtcagggttcattttgttgtcgttttatgtgtttattcagttgttccaaacttcatttttttttaaagcttttattttgtattttcttggtgacttatgaggtcgcacaattttccaagatccttgttggtcatttacgtattttcctttgtaaaattatctgtccacgtcttacttctttttaaaattatgttgtttcaagatcgagtgatttctgaagccttcattttataatgcttgaaagaatgaacaccttgttccccagctacaggcttctgctctttgtcctgcagctgcacagtggggtaagacttgggttttgttttgttgctgctttgttgtttcttcatttgactgtttccccatgggtctcatttaaaaaaaaaattggccgggcacagtggctcacgcctgtaatcccagcactttgggaggccgaggcgggcagatcacgaggtcaggagatcaagaccatcctggctaacacggtgaaaccccatctctactaaaaatacaaaaaattagccgggcgtggtggcgggcgcctgtagtcccagataatcgggaggccgaggcaggaaaatggtgtgaacctgggaggcggagcttgcagtgagccgagattgcaccactgcactccagcctaggtgacagagcaagactctgtctcaaaaaaaaaaaaaaaaaaaaatgttgtttcatatgttttttatatattctggatataagtcctttatcagatatatgtatcataagtttttttttccacattgctcctttccttttggttttcttaatgatgttatttaatgagcaagagtattttgttttcataaagtccaatttatcaactttttccagtttcgatttatgatttttgtgacctatggaggaaatctttgcctacactaaggtcaaaagaagttctcttattttctagaaattttatagttgtatattctatgattccttttattttttaattttttaaatttttacattttttaacctattatagccgtcaggatgttgtatgatccattttaaatcagtttttgtatttggtttgaggtcagggttaattcttgtttttctatactcatatccagttctagcaccgtttgttgaaaagacataccttactctattgaattacctgacacctttgctaaaaatcattgactgtatatgtggccctatattagtatatgtacgtatatacatgtaggccctgtgttgactgtatgtgtggtcctatattagtatatgtacgtatatacatattggccctatgttgactgtatatgtggtcctgtattagtatatacatatcagccctatattgactgtatatgtggtcctgtattagtatatgtacatatatacatgtaggccctatgttgactgtatatgtggtcctatattagtatatgtacatttatacatgtaggccctgtgttgactgtatatgtggtcctgtattagtatatgtacatatatacatataggccccgtgttgactgtatatgtggtcctgtattagtatatgtacatatatacatgtaggccccatgttgactgtatatgtggtcctgtattagtatatgtacatatatacatataggccccgtgttgactgtatatgtggtcctgtattagtatatgtacatatatacatgtaggccccatgttgactgtatatgtggtcttgtattagtatatgtacatatatacatgtaggccctatgttgactgtatatgtagtcctatattagtatatgtacatatatacatgtaggccctatgttgactgtatatgtagtcctatattagtatatgtacatatatacatgtaggccccatgttgactgtatatgtggtcctgtattagtatatgtacatatatacatgtaggccctatgttgactgtatatgtggtcctgtattagtatatgtacatatatacatgtaggccctatgttgactgtatatgtggtcctgtattagtatatgtacatatatacatgtaggccctatgttgactgtatatgtggtcctgtattagtatatgtacatatatacatgtaggccctatgttgactgtatatatatatgtggtcctgtattagtatatgtacatatatacatgtaggccccgtgttgactgtatatgtggtcctgtattagtatatgtacatatatacatgtaggtcctatgttgactgtatatgtggtcctatattagtatatgtactgtatacatgtaggtcctatgttgactgtatatgtggtcctatattagtatatgtactgtatacatgtaggccctgtgttgagacactattgtgttttcttgatattttgtccattcctttgctgatgccacatcttgattaatgtggctttacagtaagtcttaatataaagtctctcaaatatctaaaatattactttgaatattctaggtcctttgagtttccttataaatttaagaagtagcttgttgatgtctacaaaaatgcagtgtgaattttggttgagattgtgttgaatctgtagatcaattaaggaagaattggcattttaacaatattgagtcttttgtatagatggtatatctccgttttaaaggtccttttgtatttcttttatttctctactgaaaaaaaatctctacagaattacattgttttgtagttttcaagaaaaagatcttgcatgccatttgttaaatttattcctaagaattttacttttggcactattttaagctgaaatagattttaaatttcatttttaattatttgctgctagtatgtaaaaatacaatagatttttgtatgtaaatcttatatcctatgatcttttccaaagtcatttattactctggtaatggttttgtaggtcttttaggatttaaatacatagttttacttctttctgatcttgatgccttgtttttttttcttgctttattgcactggttagagctgccagttcagtattgaatagtagtgattagtggacatccttgcctgtgccaaacttataatgttaactttagatttgtcatatatgacctttgtcagattgaggaaattcccttctattcttaatttgctgaaattttttaacatgaatgggtatgattttagtaaatgctttttctgcatctatggaaatgatcattgttttgtcttttattcgtttaataggataaattacaatgattgatttttgccccccgttttttttttttttttttttaaagaaacagagtctcactcttgcccaggctgtagcacagtggtgccatcgtagctcactgcagcctgaactcctggacttaagcaatcctcccacctcagcctcctaagtagcagggactataggcacatgccaccatgccaagctaatttttaatttttaaaattttttgtacagatggggtctcattgtgttgctcaggctggtctgcaattcttgagcttaagcaatactcccacctctgcctcccaaagtgctgagattacaggtgtgagccactgtgcaggcctgattttttaatattgaaccaaccttgcatttctggaagaagtccaacttgcttatgagatatcatcctttttatatattgctaaatttgatttgcccagtttttaaggatttttgcgtgttgattcatgagggatattggtgtggtattttctttgtttgttagtttgtttcggtaatgtctttgtcagcctcattttggcttcataaaattagtttggaagtgttcccttctctttgttttctgtgttttcataaggttgatgttgtttcttccttaaatgtttgatagaatccaccaagaaaaccgtctggacctagaattttctactaggaaaggtgattgtttgtttttaatcacaaattcaatttaatgtatagaaagagttattcaggtttttttacttccccttgtcttacttttggtaagttgtactttgaaggaatttgtccctttcaggtaagttgttgaatttactcatttaaagttgttcgtaatacaagcatacctagggtttgcttccagacctcggcaataaagcaaatattgcaataaagcacgtcacacaaactttttggtttcccagtacatataaaagttatgtttaggccaggcatggtggctcatgcctgtaatcctagccctttgggaggccaaggtgggcggatcatttgaggttaggagtttgagaacagcctggccaacatggtgaaacctcatctctattagaaatacaaaaattagctgggtgtggtggcacatgcctgtagtcccagctgcttgggaggctgaggtgggagaattgctcgaacctgggaggtggaggttgcggtgagctgagatcacaccactgtactccagactgggtgacagggcgagactccatctcaaaaaaaaaagaaaaaagttatgtttacactatactatagtctattaaagtgtataagatcattatgtctttttgctaaaaaatgctaataatcatctgagccttcagcaagccataatctttttcttggtagaaggtctgcctcaatgttgatggctgctgaccaggtggtggttgctgaaagttgaaggtagctgtggcagcagtttctttgtttcttttttctttttctttttttttgagacagagtcttgctctattgcccaggctggagtgcagtggcacgatttcagctcactgcaacctctgcctcccgggttcaagcaattctcctgcctcagcctcccgagtagctgggactacaggtgcctgccaccacgcctggctaatttttgtatttttagtagagacagggtttcaccttgttggccaggctggtctcaaactcctgacctcaggtgatccacctgccttggcctcccaaagtgctgggattacaggcgtgagccactgcacctggccggcagtttcttaactgaagtttttgacatgggttgactctttctttcatgaaagatttttctgtggcacgcattatgtttgatagcatcttacccacaatagagcttccttcaaaattagagtcaattctttcaaccctggccacggattgatcaaataagttgatgtaatattctaaatcttttgttgtcatttcaacaatgttcacagcatcttcgcctggagtagatcccatctccaggaaccactttgtctgctcatccataagaagcaactcctcatctgttcaagtttgatcatgggattgcagcaatccagtcccatctccaggctccacttctaattctagttctctgctatttccaccacatctgcagtgacttcctctgctgaagtcttaaaccgctcatccatgagggttggaatcaacttcttccaaactcctgttaatgttgatatttcaacctcttcttgtgaatcacaagtgttcttaatggcatctagaatggggaatcctttccagaaggttttcaatttactttgcccagatccattagaggaatcactaactatggcagatactgctttataaaatatatttcttaaataataagacttgaaaatcaaatttatcccttctccatgggctgcagaatgggtgttacattagcaggcatgaaaacaacattcatctttacatacatctccgtcagagctcttgggtcacaaggtgcattgtcaatgagcaataatattttgaaaggattcttttttcctgagcagtaggtctcaatgatttttttttttttttgatggagtctcgctgtgtcacccagaatggaatgcggtggcatgatctcggctcattgtaacctctgcctcccgggttcaagtgattcttgtgcctcagcctcctgagtagttgggattacaggcacacaccaccatgcttggctagtttttgtattttttgtagaaacagggtttcaccatgttggccaggctggtctcgaactcctgacctcaggtgatccacctgcctcagcctctcaaagcattgggactacaggcatgagccactgcaccgggccctatttgttttttttttgttgttgttttttaattgagacagagtctcgctttgttgcctagactggagtgcagcagcgctatctcagctcaccgcagcctccgcctcccaggttcaagtgattctcctgcctcagcctcctgagtagctgggactgcaggtgtgcactaccatgcctggctaatttttgtatttttaatagagatgaggtttcaccaccatgttggccaggctggtcttgaactcctgaactcaggtgatttgcctgccttggcctcccaaaatgctgggattacagctgtgagccaccgtgcttggcccttttttgtttttttgttttttttcaaattgagacagagtctccctctgttgcccaggctggagtacagtggcacgatctcggctcactgcaacctccgcctcctgggctcaagcggttctcctgcctcagcctcccaagtagctggaattacaggcgtgtgacaccatgcctgaataatttttgtatttttagtagagatgcggtttcaccatgttggccaggctggtctcgaactcctgacctcaagtgatccccccgccccagccttcaaaagtgctgggattacaggcgtgagttgccgcaccaggcctcaatgggtttttaatattcagtaaaccatgctgtaaacagatgtgctgtcaagtagggcctgttattccatttctgaagcatagacagaatagatttggcagaattcttaagggccctaggatttttggaacggtcaatgagtattggctttaacttacggtcaacagctgcgttagcctctcatgagagtcagcctgtcctttgaagctttaaagacaggcattgacttctcccctctagctatgaaaatcctagatgacatcttcttccagtagaaggtgggacatctatgctgaaattctgttgcttagtgtagccaccttcatcagtgctctgagctagatcttctgggtaacttgctgccgcttctccatcagcacctgctgcttcaccttgcacttttacattatagagatggcttctttccttaaacttcatgacctgacctctgctagcctcaaactttccttctccagcttcctcacttctcttagccttcataccattgaagagagttagggctttgccctggattaggcttttgtttaagggaatgttgtggctgatttgatcttctatccagaccactcaaactttcttcatatcagcattaaggctgttttgctttcttcttcttcatgtgtgcactggaatcgcacttttaatttctttcaataactttttcttggcattcacaacttggctagctatttggcataagagatctcacttttgcctgtcttggctttcgacacgccttcctcactcagcttaatcatttctagcttttgatttaaagtgagagacgggtgactcttcctttcacttgaacacttagaggccattgtagggttattaattggcctaatttcaatattgttgagtctcagggaatagggatgcctgagcagagggagagagagcggggaacagccagtcagtggagcagtcagaacatacaacgtttattgaataagttcactgtcttatctggatgtggctcgtcatgccccaaaaacaactgcaataatggcattgaagatcactgatcactgggcgcggtggcccatgcctgtaatcccagcactttgggaggccgaggcaggtggatcacctgaggtcaggagtttgagaccagcctggccaacatggtgaaacctcgtctctactaaaaataccaaaattagccaggcgtggtggcgggtgcctgtagtcccagctactggggaagctggggcagaagagtcgcttgaacctgggaggtggaggttgcagtgagccgagatcacaccactgcactccactgcactccagcctgggcaacagagcgagactccatctcaaaaaaaaaaaaaaagggccgggcgcagtggctcacgcctgtaatcccagcactttgggaggccgaggcgggcagatcatgaggtcaggggattgagaccatcctggctaacacgatgaaaccccgtctctactaaagatacgaaaaaaatagccgggcgtggtggtgggtgcctgtagtcccagctactcgggaggctgaggcaggagaatggcgtgaacccgggaggcggagcttgcagtgagccgagatcgcgccgctgcactccagacagagcaagactctgtctcaaaaaaaaaaaaacaaagaaagaaaaaagaaaaaagagatcacagatcaccatagcagatataataataatgaaaaagtttgaactatttcaagaatcatcaaactcctacacagagacacagtgttaacatgttgttggaaaaatggtgccagcagacttacttgatgcagggctgccacgaaccttcaatttgtaaaaagtgcagtatctgtgaagcacaatgaaatgaggtgtgcctgtgttccttgtcactgtaatgtcggtaggatccgtaaggaaaacacttcattccttttattgtgactttatgttcgccatctccctctcatcagcagcctggctaggaggttatcaatctagatctttttaaagaaccagcattggactccccttttctggtgtccatttccttgagtttctctgttatcttcattacttccttccttgtacttgcttcagcgcattagtcagggcccagtcaggaaacaaaaaccacaccggcaatttgaatagcaacttgtaatataaagtgttcttaactgtaagaggtagttaactattaaagggatcacaaaggggtgacattgtgatataagaaagatgtatttgggctgggctcggtgcagtggctcatgtttgtaatcccagcactttgggaggctgaggcaggcggatcccttgagctcaggagtttgagaccagcctgggcaacatggtgaaacctcatgtctaccaaaaatacaaaaaattatcctggcgtggcggtgtgtgcctgcggttccagctacttgggaggttgaggtgagaggatagtttgagcccgggaaggcagacgttgtggtgagccgagattgcactactgcactccagcctggatgacagagggagactctgtctcaaaaatcaatgtatctgtctgtctgtctgtctatctatctatctatctatctatctatctatctatctagtctctgtcccccaactttgtttggcatgtagctcctaaaactcttgaaatctccaaagtgatgggtgtctttttgtttgctaaggaggcgactggtggctggaggctcctggacagcctggggataagggctggttgccaggggacccagccttgtgattagaaggctagaacttgcagcctttcccatccacctcctgcgaggcaagaggggatgaaggttgagttgatcatcaatggccaaagatttcatgtcatgcttatgtagtgaagcctccctgaaaacccaaaaggatgaggtttgtagagtttcaggttgttgaatacctgcaggtgctgggagggcagtgtaccctcccgtggaagctccatgccgcttccttcatacctttcttatgcatctcttccagttggctgttcatttgtatcctttgaaatatcatttgtaataagtcagcaattttaagtaaactgatttcctgggttctgtgagtcactcaagcaaattattgaacctgagaagggagttgtgaagacctcaaatttgtagccaagtcagacagaagttatgggtaacctggtgtcttaccacttgcgactgatctctgaagttgagggcagtcttgtgagatggaacccttaacctatgggatctgcactaactctggttggtgtcagaattgaactgaattgcaggacacccagttggggactgctgagtattggagaattgcttgggggtcggcgggaggaaaccacacatctggtgtcagagctgaagcactgagtgttgtgaatgagagtggagagatagagtttgttttgccttatgcaagaggactctaaggagtatagaaagagcaaatatgagaagcagctactttagaagaaaacataggaggaaagcttcgtgacattggagttggcaatgctttcttggatgtgacaccgaaaatacaacaaaagaaataaatgataaattggacttcaccaaaacttaaaacttttgtgcatcaaggaatactaccaatggcgtgaaaaggaaatccacagaatggaagaaagtatttgaaaatcgtatatccgataaaggactagtatccagaatatataaagaactcctacaactaagccacaaaacaaaaaaaaacaacccagtgaacagacatttttccacagaagacataccaatggccaagaagcacaggaagagatgcgcagtgtcactaatcatcagggaaatgaaaatcaaagccacaataaaatatgatttcacaccctttaaggtggctgttagccaaaacatggataacagcaagtgttggcaaggatatggagaaattggagccccgtgcactgctggtgggaatgtaaaatggtgcagctgctgtggaaaagatataacaattgctcaaaaaattaaactcagaatgaccataacatccagtgattccacttctagatgtatactccaaagaactgacagcagggacttgaacaggtgtgctacattcttgtttgtagcagcacttttcccataaccaaaagatgcaggcaacccaggtgtccaccagcggatgaatgaacagacaaaatgtggtccatctgtacagtggaatattattctgccttaaaaaggaaggagaggccaggtgtggtggctcacgcctgtaatcccagcgctttggaaggccgaggtgggcagatcacttgaggtcaggagtttgagactagcctggccagcatggcgaaaccctgtctctgctaaaaatacaaaaattagccaggcatgggggcatgtgcctgtaatcccagctactagggaggctgaggcaggagaatcgcttgaactagggaggtggaggttgcagtgagccgagaccatgccactgcactccagcttgggcgacagagcaagactgcctcaaaaaaaaaaaaaaaaaaaaaaaaaaaggagattctgacacatgctatagcatagatgagccttgaagacatgctaagtgacagaagccagacatgaaaagacaaatactgtatgatttcacttttatgaggtccctagagtagtcaaattcagagagacagaaagtgggatggaggttgccagaggctgggggaagggagaatgaatgggaagttggtgtttaatggggatagaattgcagtttgggaagatgagatggatggtggtgatggttacacaacagtgtgaatgtgcttcatgccaccaaactgcacacctgaaaatggttaaaatggtaaattttctgtgatggatactttaaggcatgtatgcaaacacacagaagcagttactaccactggggttgatggaaaagaaaccaagaactcggagcgtcctccacaccttgccacgtcttacgttcaggccttgttggagagtgtgtgactgccacagaaacctgcagcctactggtaacaaaaaggttcttgccagaaggtgtagaaagagtggatctgcaggatcagcttactgggtagccgagaaacctactagagggtatgggtgggcaggagctgggtgtctgagaagtttgctgaggtcccattgggctagagctggggtgctggagaaactcagtacagagcaggccccactgggcacacgccactggcagctgtgccttcagaggaaaaagagaccctggaaccaggaagagaagctgctacctcagcaaggcctggcagctccccacagtgttgtcccctgtggatagagcctgacatgactgtatttggccaaggagaaagactcataaggcctcggtccagtatcacggagcggggcctggcaggatgtatgcagagttaagaggcaatacatgggtaactggcatatttttccagattctttgttttttttgttgttttgttttgttttgttttgttttgttttgttttgagagagcatcctgctctgttgcccaggctggagtgcagtggcatgatctaggctcactgcaacctccacctcccgggttcaagccattctcctgcctcagccttctaagtagctggagatgcccaccatgcccagctaatttttgtatttttagtagagacagggtttcaccatgttggccaggctggtcttgaactcctgatctcaggtgatccacctgccttggcctcccaaagtgctgggattacaggcgtgagctacactgcacctggcccatttttccagattcttaaagcagatccttaggtctttttttttttttttttttttttttttttacttcttttctaatataagcacttacagtttccctctaagcactagcttcagcctacgtattttagtatgctgtgttttcattatcatttcatttgaaatattgtaaaatttttcttgtgatttcctctttgactcatgggttatttagaagtatgttgtttaatttgcaaatagtcaaggctcctctgagtatcttagagctattgatttctaatttaatcttactttggccagacaagcatattttgcatgcttttaaaatttgagacttatggcccagaatgtgtatcttggtgaatgcactgttttcacttgagaaaaaaatatgtatatatattctagacttcctgagtatagagctttataactgctgattaggtcaattgctagttaccagtgttcttcagattatctgatgcttgtttctcagatgttgagagaatggtgtttgctatggcctacctgtttgtgtcccccaaaattcatatgttggagcttaatctctggtgcagtggtgttgggaattggggcatcagggaagtattggctcatgagggcagagtcatcgtgaatgggattagtcccttctgccatgtggggacacagcaggaaaaggacatctctgaagcagggagctagctctcaccagacactgagcaccctgattttggacttcccagcctctagaactgtgagcactacaatctgtttataaattacccagcctaaggcattttgttttaacatcctgaatgaactgaggtggtgttaaaatctccaactatgcatccaggcgcagtggctcacacctgtaatcccagcacttcaggaggccaaggcgggtggatcacctgaggtcaggagtttgagaccagcctggacaacatggtgaaaccttgtctctactaaaaatacaaaaattagctgggcgtggtggcaggctcctgtaatcccagctactcgggaggctgaggcaggagaatcgcttgaacccaggaggtggaggttgcagtgagccgagattgcaccattgtactccagcctgggcaacaagagtgaaactccgtctcaaaaaaaaaaaaaaagagtctccacctatgattgtggaattgcccatttctccctttaattctttcaggttttatatcatgtattttgaagctcctttggttaggtgcatacacatttatgattataatggtgtctcgatgaactgatcatttaaccatgatgaatgtattcctttatctcgtaataattttatcttggactcaactttattgatatttatgtagcctctccagccttcttaaacatgctgtttgggatgcataagaaggctggagaggcttatggagaaacttatgatggtttgacttacagtttttcaactttaccatggtgcgaacgtggtatgtatacagtagaaactgtactttaagtatgtgtgaaaccattgtgtttctcactttcagtacagtattcaataacttacatgagatagtcaacactttattataaaataggctttgtgtttgttgattttgctcaactgtaggctgaagtaagtgttctaatcatgttaaggtaggctaggctaagctagaatgttcggtaagttagatgtattaagtgcatttttgagatgatatttattttccacttatgatgggtttgtcaagacataactccatcatcattcaagcagcatcagtatgtctttttccaaacagaaaatttcaacctgtgtttatactgaaacagcatcttttgtagatagtatatagttgagtcttgctattttattcattctgacagcctccgccttttaattggaatattcaggctatttctgtttaacatagttatagatatgactgggtttagagctactaccttgctctttgatatttatttctttcatcttgctttcttggcttcttttatgttaattaagtattttttagaattctattttaatttatgttttttttttttttttttttttaagacagagtctcactctgttgcccaggctggagtgcaatagcatgatcttggctcactgcaacctctgcctcctgggttcaagtgattctcctgcctcagcttccctagtatactgggattacagacgcctgccaccacggccggctaatttttgtatttttagtaaagacggggtttcaccatgctggccaggctggcctcgaactcctgacctcaggcgatccgcccaccctggcctcccaaagtgctgggattacaagcgtgagccactgagcccggcctgttttgactttttaattgtatctctttgtattgctattttagtagttactttatagattctattgcacattcttagcttttcacagtctacttagaattaacattgtttttcttcatggaaaaaaagtgtaagaactaggcaatcctatgggttcatttaccactttccatcctgtatgtgatggttgttagatatttactacatccatacacattgtaaactagacaatacaataaggaaatttttgctttaaacagccccatgcattttaaagaaattaaaagtaaaacagaatcttttctatttgcccatgtatttgctatatcctgtgctcttcattccttcctgaagagctgagttcccatctggtctcatttcccatgatcttggagaacttgcttcacggtttttgtagtgcaggtttgcagacagctaattccctttcattttcacttatctgcaaatctttattttgctgtcattctttctttttttatttttatttttatttttgagacagagtctcactctgtctccccacaggctacagtgcaatggtgtgatttcaaaactcctgcccaatctcaactcaccaaccttctcctcccgggctcaaacgattctcctgcctcagcctcccaagtagctgggactacaggcatgtgccatcatacccagctaatttttgtatttttagtagagatgggatttcaccatgatggccaggctggtctcgaactcctgacctcaagtgatctgcctgctttggcctcctaaaatgctgggattataggtgtgagccactgtgcccagcctgctgtcattcttgaaccataatttcactggttatagaattctgagttgtcagttttttctttcaggactttaaaatatagggttccagtgtctttggcctccgttgtttctgtcaaggaatcagcattcatctagctattcccctgtagaccacatgttgtttttccctggatgcttttaagactttttatccaagtttgattgctcagtacctacctctgggcaaaaaagcctccagaaaccagaaacttatctagttttattcccctctgtcaggtgtagactctactccagcttctacctacttgagatattctatactgactccaggctgttgttattttgttctttcaaatattttgtccagagctataatgttttctgcagaattgaccagatagcagctactctctgtgaccaggagccttgatcttccagacttgctgatgggctcacaaagctcctgcccgtggccctcagttggcagtggcctctctgccttgaagttgccatgagtgtgtaaaacctacaggctcaaccttcctcattagtacagtccagaaaagtggaattcctggtctgggtggctatggtgccctagaccactggctagaccagggtggtgactgccagctggccgaatgtggggtctccagcctagcacccttggactctaccccaggagttatggctgtttcagggccaggggcctggcctcagcccctgtcccccttctcttctcctcaagttgcccagcatcaggtcccaaccagcatcttttgcagacagggtgggtcggctcctcactagaggggcagggttgggcgggaagcctgttgagccctccttcctgtgcagcccacagccctggggttagctccagaggggtgcagaaaggagcccccaaaggcagaaactcacccttctctctgttcttgtgcttccagggataaaggagaggtggtcctagctggggggctaccagtggcatgcaggaggcccacatgaccactgtttgctggggcctttccttctctgtgagagagacgagagagaggagagagagtgtgagtcagggtagtgtcttcttccagtaacgcagacttctgcacgtgttctctaggagaaatcccgtcactcgctagagctctagatctggaagaagctctgcctctcttctctcctccagtgcagtgtgtgtgtgtgtgtgtgtgtgtgtgtccccacatgcattacacccttctacagaggaaataattcccgtccaagtgcaaaggttgggattggagcaggcagcatgtgggctaaaggagcagagaggaggaaacgggggcgggggtgagggtgggaacaggaggtgggtagatgccacgaggcatgccttccacaactagaagggctggtggagatgaccagaatgctccagacagaccttttatcaaacttccaaaattcaatcttgtttcatgaagcctgaggaccctgcagagtgaaagacaaggaagggctttcctgcaggggggtgtgtgtgcctgtgtgtgcctgtgtgctgtgtgcccccatgtgtgtgcacgtgtggacctgtgtggtgtgtgcctgcacatgtgtgcacgtgtggacctgtgtggtgtgtgctgagtgtgtatatgtgtgtgcctgtgtgctgtgtatgcacttgcacatgtgtacacagatctcattttccttttttctggcttactaagtgccagaaagaatttccgtgagcctctccacccttcccaaggctgcacatggagggacttgcgcaggcacatgtgcgcgtgcacacaacacacacacacacacacacacacacacacacacacacacacgagtcaggggcgagcactcctgtggattgtacctaggcctggcaggaaaccgggttctgggaaactgtaggccccacctttggcagaaaaccatgtttttgttgctgctcgttgaagggaacattaagtggggctggggacagtttatgttgagaagagcaaattttgcctatggcactggggacattgagtggctcctgtcccgggctctggagggcttgggagacacgtctgcagctctgggcatctctcaaggtcacgggcggccacactcaaggttaggccctcctctgtgtgagctgcggtcagcaggaaggctgacctcagaggcggccccagggcccttggaggccctgcccctgagacatgggccaaggtcagagagccgagaaggctgctgctgaggactctggttggcgcccagcccagcggcccttcaggcgggccctgtgcaggggctgatgaagtcagctgggaaatctgtgaaataaagcacaggtcccccaggcttgcccagagccccggcatcagatgaggtgcagagaagggaactgagctgccaagtgtgaacaggagagaggagccccaggaccacacaggggccccgacatggcaggtgcttggtcagcagcggtgctgcccttactgctggacgtgggaaaatgcactgacacttgctgaccagagccggggtgagcatctgggtgaccctgcagatgagacaaaataagggctgccgtgggggaggggcccttgccgggccaccctgctgaggccctgtgttactgtcctgcggctgtcataacaaaggaccacaaatgaggtgactcaaaacatccgaaatcggccacgtgcggtggctcatgcctgtaatcccagcactttgggaggccgaggcggttggatcacgaggtcaggagatcgagaccatcctggctaacatggtgaaaccccgtctctactaaaaatacaaaaaaaaaaaaaaaattagccgggcgtggtggtgggtgcctgtagtcccagctgctcaggaggctgaggcaggagaatggcatgaaccttggaggtggaggttgcagtgagccgagatcgcgccattgcactccagcctgggtgacagagcaagactccgtctcaaaaacaaaaacaaaaacaaaaacaaaaacatccgaaatgtcttccctaaagtttctggagccagaaatcccagaccgaggtgtctgaaggttcattcctcctgggggttccgagggagactgtcccatgcctttctccgagctctgcggcggccagcaacccctggtattcctcggcttgcagctcggcctaccccccacctggccttcaccctgtgtctcttcttgtgtctctgtccaaactgccctctctgttgtctttttaatttatttttagggacaggttctcattctgtcctccaggctggagtgcagtggcgtgatcatggctcactgcagcctcagcctcccaggctcaagcaatcctcccacctcagccttccaagtagctgggacacaggcgcacgccaccatgcctggctaattttttaatttttttgtagagacgagggcccaggctggtctcaaactcctgcgctcaggcaatgagactttgcctcccaaaacactgggattagagacatgagctgctgtgcccagcctacctctgtcttataaagacacctgtcattggatttagggcccactctgattcaatatgccctcaaataacccaattacatcttcaaagaccctatgtccatataaagtcacattcataggtactggggggtcaggacttgcatatgtcttttgggggaacacaattcaacccacaatgggtctcacccacagaacgaacggcctctccagggtgtgcgcaggtgggtgaggggcccaggagagggacctgcgtggcaagagggcttgtgttcacgtcagagattccagaaggagactggatggggtggctgcatggagcaaggggctacagccactgtctccaagtagttggtgggttgtctggtagaaagggagcatttattttgagttcccccaagatatgaagctagtaccaggtacctggaaggtgctagcgagtagagcttgactctttacagaaagaggtgtttttctcacaatgttcacttgaggacggtggaacaggctatttcacaaggtagtgagttccccatgcctggaagcattcaagcaggggccatgtgggagttgttcaggagtgcatagaagggacctcagaggtccctgccaataccatctttgcttgtcttattttacgacaacttgaatttcagaatgtaatgttattggggatatgtctactagaggggcctccagcatcaggccccacacactatgcatcatttttagggcagggaatgagagcaggctccattctttttggttgtctgtgaggaccaggaggcttgctgctgaggcagcttcctgtggaaacagtgtctcagccccgcaatccattcatcggagctccaacatcttaatgaaacactgtgtcagatgggttctgggcatgtgtgtgcagattgtcacaagtccatgagaatgcacacacgcacattgcatgtgtgtgcacacatgtatgcacacatgcacaagaacacgaagacccgaggcaggtatagtccgtgagacagatccctctaggctgaaagactccccacaagggtccctagaacaaggctccagcctcggcagtccctcccacttctggtgggaggatctccacagagaagaagggtcaagaagcacagctcttgatgctcacggtgtaccaagctctgctttaagcttgtgtcttattttttacttatttagcaaatctgtcgctcttgttttgtgccagatgctgttctcagcactttacaaatattgatgcatgtttgtttcatgacaaccctgtgaagtaggtagtgttaccccgttttatagatgaggaaacaggcgtagagggataaagggacttgcccaaggtctgtctctaccttacacgcacatgaacgctcactcatgcggcaggcgctagtttccctctgatgtgagtcaggccttgagctggttggggtctgggtcccactttggttgtgttttgctgtgggcaccaaggaagcttctagcagcctcatctccctggtatgacctagctccagggactggatttccccaaatgctcctgcccagcctggagcctcctttccagctgggggagggctgaacgacccctcactcttggaggctgccggagcccctcctgcctgcatgcggccgctgccgggtggacaggcctgcttgtgggttgaggctcccagcagctggggtggatcatttctcctcccaagaagctttgggagaagcagctgagggggccagcgtcctcctgaggccaattccctgcctcccccagcgcaggcgcgaagccatctttgcttgtgtgtttgccacagacagtggagggcggtgcaatcgtgacgcctgcttgttgcactttgcgtccttgaggacgttgacccctggccggtgctgggcgcttgctcttcagtcatcttgccctgacctggcgtggcaggcccgagcactgctcttttacaaggaaacaggctcagaggccttgagtcacttgcccgggctcccccagccaataattggctgagccaggatttccatccagctctgtgactccagaagtccaagttcttcccatcacgtcagggccaggaaaggattagaatgcttttctacgtgccgattatttggatgatctgtgcagcttagctcgttgtagttgctcaataaaaatgtggaatgaatgggcctatatgtcccattgtgtgactcagagccaatgactctggctgatcctcctgttttcattccgtggcccagcatctccctttggggtgtgtgaccttggaagcagtgactctctccatcccaccttgaatggtgtctgcgccgcagcaggggagcagctggggattgccagcgcctgttgctggtgggctgtgcgccagatcccgtcttggatgtgtgggtgattgtcagccacatgtgtgtgaagggctgtgcgtgtaggatttgtgcaaatgtgcccctccctgctgccagcccatgggaggctgtcaagattctgcccctgcacattagcccacactctctttgtggcccactgctgtggctgttcccttgtgtcacgtggctgcaggcacagcccccaagtggatggggatcgtgggctgaatgtgcatcagatgctcctgcttcttggtgggtggagaccctcaacccatgcaccgtggctgccgcatctgaaaggccttccatggtgaaggacttggacctgagcaaccctccgcagaggtcttagaagtgctccctggccgggcgcggtggctcacacctgtaatcccagcactttgggaggccgaggtgggcggatcacaaggtcaggagatcgagaccatcctggctaacacggtgaaaccccgtctctactaaaaatacaaaaaattagccgggcgtggtggcgggtgcctgtagtcccagctactcgggaggctgaggcaggagaatggcgtgaacccaggaggcggagcttgcagtgagccgagatcgcgtcactgcactccagcctgggcgacagagcgagactccgtctcaaaaaaaaaaaaaaaatgaagtgctcccagctcttcctcctgtggtgaggttctgagtttccatcctcagaagaaaacctggctggggagggcatctctagacccggacataaacgccaggagaccagggctgccctctcaggtgaccaatcacagagactcagggaaagtcacgtttggaagaggcgacactgtgtctcagcctcattcatttctccatcctacagacactgcctggtgcccagcccgcaccgcgaggcttcctaagcagctctgggcaccgtgcacctggcatggcctccagccccatctccctgccttgggagacccggtggggactccgggctgagctcctgtggctgtggaaccttggtggtttattgtggtggctgagaacagggacgtggggttggacgggttgagtgtaactcccagtggctccgtgaactgcctgggagccttgggcagctctttctcactctgtgcctccgcttcctgatggaaaaatgggggccaggggggagcgaccttgaaggtattcgtgggaaccaagcgaggtgataaatgtagtgtccttggtagagaactggacacagagtccacccccatgaagggggctgctcctcctccttctatgtttcctcttgttcttatttctcctcttgtatcttctcttcctgctttccctccccctcccctccccccccacatgcaggcacactccatttggtgccccaactgcctttctccattgtccttctgtaagtggttctctaagtgggaactcaggcctggaaagggtgggcaccctgtctggtgggctctggcaggccaggcgctgagcagcctcaggagacacaaccctaggaaaaggctcatgcaggctggctgtcatgacggactgttggtgggagaggggaaggcgccgtggtaggggaagctttggaaacatccactagtggccttatttatgactcaggacacctgccaggtcactagaacacagctgaggaagctgtcggccagacgtccagaagcatcaacctggtggctgggctgtggggggacctctctggacaggcagacaaggtgtcggaggaaggggctgacactcactcagtgtctgtcatgcactgagggcacaaagggcaggatggagagctggcccacgccacctgtggaatcttccaggtgtgggggcagatggggaagcaagggggcttgaagacacatgcgctcattaaatgtccttaaatcccaagaagaagaacaaggacacatccacaggggcagggctgaaagtctgatgcatggtgttttggggtctgctcctgctgcaacagctacagtggctccctcttacctttctcttccctccattctgttgtgaaaatgttcaaaacacatggtcaagttgaaagcattttacagggaacacattcagccatcacctagattctaccactaacaccaagctacacctgctttatcacctcaccgtccatctatccctccttcgcctggccatgaatccattttatttttattttttggtgcatttcaaagtaatttcaggtcatcctgattatctctggaatcactgtcagaaattccctcccttcccctcccctctcctttcctttccttttctgagatgggatcttgctaggtcacctaggctgaagtgcggtggtgcagtcatagcacactgcagcctccaactcccgagctcaagcaatcctcctgcctcagcctcctgagtagctgggaccgcaggcatccaccaccacacccagcttcattttcaaaatttctcaccaactcctcactccttgtattcacccaggaccacttctcacaaagccagggtgctgcaggaggggtcagaaccccaagccctaatcctggctctgtcattaacactgtgcgaccctcagcaaatcattttgcctgtctaggtcctgttttcattcctatgaaacgagggcgttaaactgtatgttataaataatgagggctaccagttaccaagctcctattttaggccaggcacttttcacatgttattatgagtcctttcaatctaggtattgttctcaatggacagcttagtcaacggaagctcagagaggtggtgtaacttgccaaaagtcccactacccagtgaatgtccccacggggtctgcacccaggagtctgacacagagcccaggcctcagcacctggcgatgttttgggggtgtgagcagcccagcctactctgggcacgtgtttacttgctgttccttctgcctcatgtttgtgtttgtcccctctgaagctcagactgttattttccagttccaaataccaaaactggctaggcacggtggctcatgcctgtaatcccagcactttgggagaccaaggcgggtggatcacttgaagtcaggagttcaagaccagcctggccaacatggtaaaaccccatctctacaaaaaatacaaaaattagccagacatggtggcgtgcacctgtagtcccagctactcaaggagaacccagctacccagctactgaggcacgagaatcacttaaacctgggaggtggaggttgcagtgagccgagatcgcaccactcctctctaggctaggcaacaagtgtgagactctgtctcaaaaataataaataaataaaataaaataaaaattaaaaccaaatgccaaaaccaacccacaaaataaaccttggttaaagtagcctgttcattttgctttaactatgtatattgcaccagattctgccaggggctcagcgtataaagatgagacccctgccctgccagacaggtgggatgatggccataccttgagttagtcaaggcaccatctggctgtgtaacaaaagctaaaacatcagaggctgagcagcactcggacccacgtcccagtccaagtgtcagtcgttatgggggcccaggacagcccggacctagttcattcctttggtgcatcctcgacacacagcttccatctcttgagctgagatggttccagctcctgccgtcatgtctgcactccagccagagggaagggaagaagggagaggggaaagggcaagtgtccctctttatttttaagggcatgacctgaaagttaaacacttcagctccttcccactggccagaacccagttgtatggccgctcctgtcatcagggaggctgagcaatgtattcttcagctgggcttccctgtgcacaaccaaaacttcagttactatagaaaaaagggagctcagatattggggaaacaactagcatctgtaccacatgcactgatagctctctttgtatgaacagagctgtggcaggccctatgccagggagaaagtaagattggaaaagagcttaccaaggaggtggcatttgcactgtgcttaaggggcaagaaaaacgtcttccaatcaggagccacaaatgcttggctgaagtgctactgctctttcatcctggagctggaacagacgtcaccagtcaatcatgatggctgctgggtgcactggctaacatctataatcccagcactttgtgaggctgagggtgggaagattgcttggggccaggagtttgagaccagtttgggcaaattgcaagaccctgtctctgcaaaaaaatataaaatgtagctgagtgtggtggcacctgtagacccagccccagctactcgagaggctgagatgggaggatcgcttgggcctaggagttcgaggctgcagtgagctatgattgcaccactgcactccagcctgggtgacagagcaggacctgtctctaaaaacaataaaataaaatcaaagttttaaaatggaaaaaaaatcatgagcacataactccagatgtatcctcaagatagcaaacccgggtgggcgcagtggctcatgcctgtaatcctggcactttgggaggccaaggtgggtggatcacctgaggtcaggagtttgagactagcctggccaacagccccatctgtactacaaatacaaaattagctgggcatggtggtgggcacctgtgatcccagctacttggaaggctgaggcaggagaattgcttgaacccaggaggcggaggttgcagtgagccaagatcacaccattgcactccagcctggagaaaaaaagcaaaactctgtctcaaaaaaaaaaaaaaaaagcaaacccagggccaggtctgtagccacatggccaccttcttccctgagcatggaggcagcctcagaaacctgccccacatcacatcagtgggcagttgattgggtcagcctgccagttgaaccctatttgccacagtcattctccatagtaaggggcattctagacataccccccttcccagggaagaataagccgtagctgcctgagcgttttatccagtggtgtgcatgtcttttcccaactctgtgtttagtgatgtcctgtttgtagcttgaaatttgccacagtgggtgtgtttacaccacaggaattggcaaacactacatatcaggccttacctcctgctccctactagggtaggttgttttttttttgttgtttttgttttttgtttctttttttttttgagacggagtctcgctctgtcgcccaggctggcgtggagtgatgcgatctccgctcactgcaagctccgcctccctggttcacaccattctcctgcctgagcttccagaatagctgggactacaggcgcccgccaccacacccggctaattttttgtatttttagtagagacggggtttcaccgtgttagccaggatggtctcgatctcctgacctcgcaatctgccctcctcggcctcccaaaatgctggcattatgccactgcgcccggcctagggtaggttgttagaaatgtaccagcctgccagtttcagccttgtttgtctttcatcctttttttttttttttttttttttgagacggggtctctctctgttgccccccaggctggagtgcagtggtgtgatcctggctcactgcaacctctgcctcctgggatcaagtgattctcctgcctcagcctcccaagtagctgggattacaggtgcccaccaccacgtccagctaaattttgtatttttagtagagatggggtttcaccacattggccaggctggtatcgaactccttacctaaggtgatccacccgccttggcctcccaaagtgctgggattacaggcgtgagccaccgcactgggcctctttcgttctttcttaatgaaaatcttcctgaaagatttgcctactgatgtctgtgtcaataggtactgcctgcgggacagagcctgccctccttttgaaggtctttctctgtctgggtgaccatctgcatgtcactccctgctgctcagaactaaagatgtagctatgcctggggtaggttgggaaaacctgtgggaatcacagagcttgctgtcatgctgtgttctggatacctgaagcttggcaggcaggtgggatcgagggtgggcattaggaaagtgatgtggctctataggaaggggacataggtcctgagattttaggtccccaattggacaaagctgttttttttttctggataaatgttctagcttattcataatcgagtggtcagttttcttttcttttcttttctttttttttttgagatggagtctcgctctttcgcccaggctggagtgcagtggcgctatctcggctcactgcaagctccgcctcccaggttcacgccattctcccgcctcagcctccggagtagctgggactacaggcgcctgccaccgcgtccggctaattttttgtatttttagtagagacagggtttcaccgtgttagccaggatggtctcgatctcttgacctcgtgatccgcccgcctcggcctcccaaagtgctgggattacaggcgtgagccaccgcgcccggccaagtggtcagttttctcagctgccgggtcttgcacaccttgctggctctggagaccatatgcaccatgtagaccccatttgtttcctaccctcagtgttgggggaggggccaagggcctgtcgatgtgttgacacctggccattcactggccttgaatgtccacattcacctccttgaaatcgatgccccgtatcggaggctccatgtggatttgggggcagaggcctgtactccagatggtggggtggccttcaccaatcaggcagattccctgccctgccctgccctttgggctctgtagctccagatgtgtgctcaagatctgtggccacatggatgggacaagccacagagactcagactccgtggtccctgtgaccagagtagccgtggccctgtctgggaatgttcccaccctgttgctgaaggtgagaaatttctctgtgctggagaacagctgtgctgagaagttggcccatctggcttgcaggactgctggggcaagggaggtctgctgccggtctcttccttcctcctctgactgggtgctccttgtctaggttccttgcagcaaaagaattctctaatttattttgttcccttattgagtctctactccatgaagcccacctcctaatcccagctgactggctcccacctcctcaagaggaaggccaggggcagacgaggctgaaggaggctgactcccctgtgccttcgcagtctgagctgatgctgctgtatgttcacagggctccttcagcttttaaaaaggcttcaacacgttcgtcacacgcttgtggctctcctggatgccacactaactcagtaaggcctgagttagaggctgttcctgaggctgtgaaaatagaagaagggtccagaggagaatcccttcatctgacgatcccaggaaggcttcctagaagaagcagcctctgagctgagacctgaagacagatcaggcctgagtcaggccagggagggtgtgaggggcccaccaggcagagggaacaggatagggcaggcacagaggtctggcacctggcttgtggggaagtgtgagcccctgggcatgaccaaggcggggagaagtggcgtgagaggaggcagatgtggctggcaggagatcggcggccccggccttgctgagctccactctgtatgcaccaggtgacagaggctgcccaggacggtgggcagggaagtgacaggtcacatggtcatcccaccaacagccgggagtccagcttggggggacccaagaccctggggaaggcacgagtcaggggcctgctagagccaggagctagtgggagaaggaaacagtgttgcttatgaattataaacagacactcccgcaactttctctgacgtgatacaatctcaaagtgggccacccagaggtgggaaggtgacttctggctctccaggccttgggcctgtcttttttttttttttttttttttttttgagatggagtctcactctgttgcccaggctggagtgcagtggtgtaatcttggctcactaccacctctgcctcctgcgttcaagcaatcctcctgcctcagcctcctgagtagctgggattacaggcacctgccaccacacccggctaatttttgtatttttagtagagatggtgtttcaccatgttggccaggctggtctcgaattcctgacctcaggtgatccgcccaccttggcctcccaaagtgctgggattacaggcatgagccactgtgcccagccgagcccatcttcaagttctccctggccctcagtgtttctgtattagttcacccttttggctccctgcttttaagagtctcccttaagactgtccccaagtggacaggtccccagaaccaaggagcagccttaggagtccccagttacagacactccagggggtccgtgtggccctcagcctctggcctggttccggcagccttggtcctttgtgctgtctctcacatagcctggccagagctggccaggtcccttggctgggccgagtcatcgtggccagtgactcatgcagggggagaaaagtgaggagggggaacagagtgcgagggggactgtgttaataacaaacccattaggtccctgaggtcacttcacaggagggacaaatggttcatttaggttgatctggctgccggctggcttccagagacactcagggtggggaagatttcattatctggggaaagcaataccagattgtctggaggggcccagccagcgcaccccgcgcttcctgtctgcctcccacgcagagcgttctgttcccaaggcggcaggccaagagcgcgagccgaggctcaggtgcaaagaggggtgcggcatgggggcactgcagggcacggggtgcatgcatttttatttatttttttactgagtgttagggtaatttgttaatggggtatatttggtgacataaaaccttctgtcgattcatggcagtctggaacggagtggaagcgtcccactcctggggaacccccacacacatttggctgtgaacgtcggtgcctttgcactggagcctctttggagtgtgctgggcagagcggagaggttcctcttctctcttctccatcatcctgtggaggtgtcaacatgtagccagagatggtcagtggcagtgaggagaggggggcaggaagagaccagggctgggggcttgccagcccacagttctacccctgaacacccatggcctccctgttcaggtcagcgaggctgggggcagagacgggcaggggtcccccaatgttgggcatctccccgctccctcatactctggatttgccctctggagaaagctctggagcacccagaagtcctggggctgctggctgaggtggggagcagagcccagctgtgcctggaggctccccacttccactcagcttccagggacagtctcagctgtgcaggcccaggccgctgaggctggctccagaaatttcttcacaaccaccactggatggaaaaccagttctctaaagggccccagagccagttttgtttcttcttccacaggttcccatagttagagcatcgggtctttgttagagatgcagaagagacgatgtccccagcccttatgtggttcggtctccactgtggatgttggtgatcttagtctccttctcaaaaccaagagggctgatgccccacattccaggcccccagaaagagccgccacccacccacaccgctacatcttctttccacttttctgttccggaaagagtagagtggatatgcgctcctgtagaaatccatctacagcctgactgcagatgtattttgctcccttattgagtctctgctccatgaagcctgccttgtttgtacctctttctctctctttctctctttcttccctctcttccttcccttccgttcccttcctttttctttccttcctgtcttattctttcctctttctttctttcctctctctctctttccccctttctctgtctttcctatcttttctttctctctctttcctcttttttgaacagccaaagatagaatgaatggcataggtaggtactgagctccctgtaactggaggtgttcaagtgtagggtggatgggcatttatagggcaggcattgaggaaggatctccctgggattgtggatggcaggacaggccctgtggagccttctgagcgggtgcagaagagggagggcatgttcctgctccctgcccttcccgggttgccaggccgccactcccaacctccaccctctttccttccacctgctgggccttacgggatgggcagaggcattgttagaacatggagccgcggtccacagagggccagcagggaggagagctccctggggaccacgtcgcctcagtcactgtggtgactttgaaaataaatgctttcttctctgcttgagtccctgttgttcctgctgacgtggaactagggcaggctggtgactcagccctcatccctgcactgcatcggtggcaagttgcctccagcctcagaccccacagagcagggtgccttcttcagaaaaacagtagggaggccaggacaccaagggccccagggacagcctgtttctcctggctggcatgagttctagccaagcctcctggtaccctgggggtgaggaggtaccagctgtgtgctttagtcactggctgctttgaggctgggtcggtgccaggctggccactccttcttgtcccctagtgtgactttgcagagctcccggaagggtcagagggtttttttccatcactggtgtccatgggatactgtgtccccatctcatttttgtactccagtctcagacgggtgctaggaagttggagactttagccatttcacgactgtgtcttgcggggctggagtaggaacaggagtaggaggaacgctctggtcatgggactgtgtgaagagagaaggatcaggaagaaaacatgagctatcatgtctgggttatacctcagcagagccgctggtggcctcccaggcatctgaatttactaatcacaaagctcaccaggtgtgcaaataaacaaatgctgttcaggaggcacagccagggttctgctggagagggatcatcttggaggggtcatactttccacccagtccttcagtccttctgtcctgtgtgtgtgcagcccctgaccaccaccatccctgcccctgccacttgctcccagggttccatcaggttggatgttattgcaataaaatgtagcaacagaaggtccaggcagtgctgcagtccctggtggtatcatcagagccagcaggcagcagggctggggaactccaagctgattcagtcccaagtgccggagcggggagctcggatgaggtgggggtggggaaccggggagccatggagcagagcatttgctgtgctgaaggccaggagcctccttgggagatcatgaatttagaacactaatactttgtttaaaaagtcccctgccttggagataagagctcaggccgctgtggtcaggttttgctgtaaatgttctgcacaaagcaggctggggggatcactgggaagtctggggaacagattggtcatgtgcttctttgagtgaaaccttatggttgcattgaagcggccaggcagagggtgtgatggggtgtggtagctgcacaccggctcagtcaggctgaatggggaaatgcaaactcaggtggcctgaaagagacttagtggtccacagcctggtggctgctcccagtacaggtgatgtaaagagagaaggggttccgggggcttggcccaggtggaaaccatgcactgtctgtgatcctgggcatgtcgaggctggagcaggtctgcttggtggctggcagaacgcacatgaagaatccatgtgtgttctgaacgtcccctctgcccctttgggctcatgccccatcaggagtctcccgactctgccattctgcaaaggaaactgcgctttgtcattgcacaggatcgaacaggtgtgtgtggagtccctaaagccactgtctcaaggggtctcatgggacaatgggagagttgctgtgatgtttaagactaaagtgatggctgggcgcagtggctcacgtctgtaatcccagcactttgggaggctgaggaggatggatcacttgaggccaggagttcgagactaccctggccaacacggtgaaaccccatctctactaaaaaaacaaaaattagccgggcatggtagcgggtgcctgtaatcccagctactcgggaggctgaggcaggagaattgctccgatctgggaggcggaggttgcagtgagccgagatcacgccactacactacagcccgggcgacagagtgagactgtctaaaataataataatgctaataataaataaaataataataataaaataataaaagcaaggacttgaacaaatatttgcacacccatgtttgtagcagctttactctcaattgctcaaatgtggaaggaatggatatacaaagtgtgtgtacacacagtggaatatcattcagccttcaaaaggaacggaattctgtcactacatgtgaaccttgaataatgaaccttgaagacctcatgctacgtaagcctgtctcacaaggacaaatattgtatgatttcacttatgtgaagtcaaattcatagagaaattggaatgacggttgccagcagctaggggaaggaaggatggggagttattgtttaatgaggacagagtttcagtttgggaagttggaagaagtttcggaggtggatggtgttgatgggtgtacaatgtgaatgtacttaatgtcactaacatggaaacttggttaaaatggtaaatttgtcttttttgtttttgttttttttttttttgagacggagtctcgctctgtcgcccaggctggagtgcactggcgtgatcttggctcactgtaacctccgcctcccaggttcaggcgattctcgtgcctcagcctcccagagagctgggattataggcgtttgccaccacgcccggctgatttttgtatttttagtagagacagggtttcaccatgttggccaggctggtcttgaactcctgacctcaggtgatccacccaccttggccttccaaagtgctgggattacaggcgtgagccatggtggctggccaaaaatggtaaattttatattacatatattttatcacagtaaaaatgcattgctctattagaaaaatgatagatttttacaatatgaattaaattacaagttatgaaggaaaaattaagcaaaacattaaaaaattacttataagtaattatatttaaaacaaaagataataaatacacaactttcatcacctcttaggttttttgcaacatttaactattgtctgtcctgttgcggttatgttcttgaggttgtatttgtatgatagaaacactatattcgtggtgactaaacatctcttctcagtctcacctccaatgatgtcatacagataacttgaaattggccggctgggcacgatggctcatgcctgtaatcccagcactttgggaggccaaggcaggcagatcatctgagttcaaaaccagcctggccagcagggtgaatcctcatctctagtaaaaatacaaaaattagccaggagtggtggcgggtgcctgtaatccgagctacttgggaggctgaggcaggagaatcacttgaacctgggaggtggagtttgcagtgagccaggattgccccactgcactccagaccgggtgacagagtgagaccctgtcaaaaaagaaaagaaaagaaagaaattggccaaggcaggaatattgacaccacaggaataggcaagcgctacaaatcgggaaactgagtgttgttgcttttgctggccccaggtggccggttgttgaccgttaactggcacactactggaggagggaggttcagactgattcgcagagagactagaggtagaaacgcaccatggtttggatgctgagggtgagggaaagagaggagtcaacagtggtgcccggagacttggcttgagcaactaggtggatggtagcaccgtttcctaagatgaggggctgtgggaacttgaggggctgtggaaggctctgccactgacggacccagggctcggcagctctgggaggcctactttgtgtcaggccacgcagagataagaccatctgggccctgcccttgggaagtctctgtctatgaggacacagcctgccacctaatggggtgtcccgtctggagcctcagtgttgctgggagaaagcccctcaccttccttcgctctccgagcctcttttgcttccctgccagctgagcctctccatggaggctgtgcctggaggggggtcatggatatggatgtgtgcgccaaacgctgcttcctcgtggatttcctccccactccgttcccacgctttgtaagcttcatttccccggggcctgacctgtggggtttctctccagacctgctccttcccatttccagaaaggcgtgcaggggtttcctatggctctcttccctgtccccatcccccttcccttgggacagtgatctgctggacgggtgggctacccacagggtttgtgattgcttagacatctttgctgtatgaagctttgacctcaaggcatgatgcagatgggaataaggcacgagtttctcctggctgctgtaacaactgtcgaaactgggtggcttatagcaaggggaatgtgtcctctcacagttctggaggccagaagtctgaaatcaaggtgccagcagggccagcttcctctgaagactccaggggaaaacctttctttgcctcttccagcttctggtggccccaggtgttccttggcctgtggctgcatcactccggtctctgcctctgtcttcacaaggcctttttctgtgtctctgtactttcttttctgtctcttagaaggacacagcattgaatttagggcccaccttatcttgagatccttgcctaaattctttctgcagagacccttaaacagaatcaggtcacatttgaggttccaagtgggcatatctttgttttgggggggatcaccggcccactgtaggtctcgttgtgcactgaagacgcaggcggtccctttggccaggcctgcagtcggtcttgccttcttttgtgaccgtggaagaatgcaccttgctggatgcacaggcctttatagttcttttgttcttgccaaatttcagctcagtttcctctctgctgccggcgtgcatcttctctgcccagtgccccttctgggactgtgtgtccaggccctgaggccctagaaaaggggggtggagggcctcctcactatcctgtagcaatgaggcctcattaaaatcctggagccccagactggacccagcccttagctatgatcaaaggacagctcgggatatgattaaagggctagagaaagatgatttaggctgagaaagaggaggccaaggagcaactggattgtccttgaatgtggaaaaggtaattatgacttgaagggtggtgcccagctgtttcccatctcctctgaggacaggaaaaaaaaggaaataaatgatgtacaattagagcagttggttagatacgagggtgaacttcctggctgggagtatggccaagccctgatttgggtttcctgaaagagctcggggaacctccttacctggaggtttctaggcctggtcatgtggctctgagtgattacattgaaggggcagtggctggggctggagccggtgggctctgagcacagtcacgaaggcatgcgcactttctggctgctctcctgccattgtcccttgggttcccattttggtgaggcgtgcaccctggcggcgctccccagggaactaaatatgtttgctgcactgtgcgtggagatggagaatgtacaattggctgaccctgtgctaatctggtggaactccatgccagccctgggaaagaacaattgcatgggtgtgtccacactcaccaggtgctttttagaaaaacactcgagaataatgctgtggcttaggatggctgttgtgccggacccggcatcttcccaggggggctgtgttgttgggctgagtttcttaggtactggacccccaaatccccaaatacggcgtggacaggtggcccagtaggggctggactatccgataggcccaggtgctggagttcagacaagacataccctggcctggcgtggaagatacggggtgctattaatggcagcaatggctgcatttctgaaacccgggctcccaggccgacgagggtgtgcacgcatctgaaatgtctgtggttttgcagttcccatgtccacaaactcacttggttgaaaatagttcaaaatatccaaagcatgagggagggagtgcctgcttttcttaaaaaggaaggacttgatttcatctacttaaaaagccacccaaacctagaacattttccgcaagagaccccctgccccccgcctctccagaatggctggagagtctcagcactcctgcacatttgggatatttcagagggggtggggaggggcaagtgggcagcgagcgacctcagacccaggatgagctgtcaggcgctccccggccacacattcaagggaccggagtgcagttgtagcgttgcggcctgctgcttcgggggtgggggtgttgttccatgctgtgaattctcacatggcccctgactctgggcagaggccgagggtctaagggacggggtgacagggagagcatgcaggagtgggtttctggctttccagggcgagtggaagaagcgcctctctctcttgtaggtgacagacctggggggcccttcttgaggatgagagcctgttgcttctcaagttctgtgtctaacccaggtccccaggtctaccccagcccctcggccctgcctgccttgtggatgatatagtttaagggtagagaccgctggcctggagggaaggctaggcctcaggttagggcccagaagggagggagaagcccttggggcagctccctttctgctcactcactgcctagctccttccttcacaccttccttcggaaacgtctgctcctgacaaggtctacttcctgctctcaggaggcccttattgtggaggaagggaggcgtcgcccgtccctggcttctctgacagccgtgttccatccccgccctgtgccccttctcccggacagtgccttctccagggctcacccaggagggtgcagcggtggcccccggggcggtggtcgtggtgggggtgttagctgcaggggtgccctcggtgggtgggagttggtggcctctcgctggtgccatgggactcgcatgttcgccctgcgcccctcggctcttgagcccacaggccgggatcctgcctgccagccgcgtgcgctgccgtttaacccttgcaggcgcagagcgcgcggcggcggtgacagagaactttgtttggctgcccaaatacagcctcctgcagaaggaccctgcgcccggggaaggggaggaatctcttcccctctgggcgcccgccctcctcgccatggcccggcctccacatccgcccacatctggccgcagcggggcgcccggggggaggggctgaggccgcgtctctcgccgtcccctgggcgcgggccaggcggggaggaggggggcgctccggtcgtgtgcccaggactgtcccccagcggccactcgggccccagccccccaggcctggccttgacaggcgggcggagcagccagtgcgagacagggaggccggtgcgggtgcgggaacctgatccgcccgggaggcgggggcggggcgggggcgcagcgcgcggggaggggccggcgcccgccttcctcccccattcattcagctgagccagggggcctaggggctcctccggcggctagctctgcactgcaggagcgcgggcgcggcgccccagccagcgcgcagggcccgggccccgccgggggcgcttcctcgccgctgccctccgcgcgacccgctgcccaccagccatcatgtcggaccccgcggtcaacgcgcagctggatgggatcatttcggacttcgaaggtgggtgctgggctggctgctgcggccgcggacgtgctggagaggaccctgcgggtgggcctggcgcgggacgggggtgcgctgaggggagacgggagtgcgctgaggggagacgggacccctaatccaggcgccctcccgctgagagcgccgcgcgcccccggccccgtgcccgcgccgcctacgtgggggaccctgttaggggcacccgcgtagaccctgcgcgccctcacaggaccctgtgctcgttctgcgcactgccgcctgggtttccttccttttattgttgtttgtgtttgccaagcgacagcgacctcctcgagggctcgcgaggctgcctcggaactctccaggacgcacagtttcactctgggaaatccatcggtcccctccctttggctctccccggcggctctcgggccccgcttggacccggcaacgggatagggaggtcgttcctcacctccgactgagtggacagccgcgtcctgctcgggtggacagccctcccctcccccacgccagtttcggggccgccaagttgtgcagcccgtgggccgggagcaccgaacggacacagcccaggtcgtggcagggtctagagtgggatgtcccatggcccccatccaggcctggggatatcctcatccgcctcccagaatcgggccgtgggggacagaaggggcctgcgtgcgggcagggagagtattttggctctctcctgtcttcggggtttacaaagtgtgttgggacttgcggggctgctctgtccaagcctgggtctggcgtccgcgtctctgagcctgtgagtgcgtgcgctttcctgcgtcctcttgactgccggtgctggggctctgcgtcctgcgtccgcgggagtaaatacagcaggcgaaggggaagctcacacaatggtctccagcgctctggggcagggcttctgaggggcgggcctgcctctgccgggacctggagcccccgcccctcggagaggctcctaggctgacttgggcagagccctctggtgggccgggagggggaaaggctgtgttgaaatgagcaaactgtccaggtgtcaggccaagctgggaggtgaccagcctgaggtcctccccgctccatggccagaaccagggctgacatctgggtgtcctgagcccagctgcccacacggcccacctggggtcagccctatctgagtgggggaggcggggcctcctgggggaccagaactttggctggacgccaagcagagtgccagtggctgttcttcagggctgggcctgaggagggtgtggggcggcgaagggacgggagggggttgtgatccagtggccactggcgctgtgcagagtgtgagctggaaacatcgtagttactttgtcagcttagtggtgaaagccctttttcaggctctatccctttgcatccctgcttcccagagggaggggaggtctgggtctgcagagctgggagggcttgctgttcccgcccccctcccccacaacacctcctcatctggacatctttgggcacatgctcatactggggtctccctaggtccactgtgttccgttgagcctcctgcagtccccgagtgaatgtgacctccctgcccctgcctctttgcaactcctccctgcgaccgctcctccaggggccttccttgtcccaaatgtccaagtggcacgacttagccggtctgaccactttccagtaagcccttatggagagaggccctgtgttgtgcagagctctcctcctgcctgcgggatcgaggtctctgctctcagttcctaacagaaagtgtcgggcccccagtgggatttctggggaagaactctcgtgtctcaacgggagccctgtggcgggaggggaggccagggtttggggttgtgttcgttgtacagctgtcaccatttgcactatgaaagttgttagtgccccttccttgggtctctgggtgtaactccacccttgcccccatgtgcctccatctggagctgcttctgcggctgtctcccaagccagttttgtgaccctgtaatttagtccaagacaatgggctcattgagaccatcctggtgcagcagttggcaatcctttggctctgggggaaggtttctcagtctcggggagtggggcctcaatctgctggttccctgtgtttatcagtctcccccttgtgtgtcctgaatggttttgctgggaattctggtcttagagccatcaggtggcccgagtcgataggcgtgagagagtgtgtgtgtgcatgagtgcgcatgtgcatgggggctgacctggggtatggaaaggtggccctccctggtgcccaaggagcctggagtatagttggagggtgtgggggtgtgtatatgggagttggacaaccttgggtggacagacagacgtggggaagggatgattgaaggaggtggaggagagagtgtgattcagcccagccaggggtgatgtggacaggcagcttccgaatcagggtagagaaaagtcaccactagctagcaggggagaagtcagtatggaggaggcggaccttgagggagagtaggaattggattgcaagaggaaggagagccttctggccagcagcagccagcagcagtgggggaggctggaatgagctggctggagagggggctggggcataaggaggggcctgcctgtgaagatcatatgggccaggctgcggagggccaggcatgcccgccgggagtgcagctggtccacgggaagcatctggagtggctgggaatgggcgcaggagcagcgccgtgggagcacaggtctctttcccggggcggctcacctggtgtcttggttcctgcaaggtaggccgaaagggtggggaggaaactgccagctccttacagcgctgggatggtggccccagggttcctgaggccagcggatgtgggtgcctgtcaccatgtgggttgctgaggggcggagactccaggggccaccccaaagcaggacgagctctgagccacggcatctctgggggcagttttccaatcgagcagacgtctaggcctggaatcctgtaacagaggccacagggccctgatcagggtgttctgggaggcttagaactagtggcagtatacagggtagacggcaagtgacctggcatggggaaagaggcaggtgcccaggccggcacagcacacccgtaaggaacaggtagacgggaagccgtccgtgggcctgtgtgtgtgctcggagttaaaattctgccaatgtcccatgtcctgggcacatctaccccctccctggggagcacctttctcttcaccttttccttccccgcctgtccccttcacccagggccttccccatccctcccgtcttggggaccgagggcaccatggctttatgttccatcaccgatgagttgcacagggattcagtccttccgctgttcaggccgggtccttcaggctcagggttcccaggaatggagagggtatcagtgtcttccatggactcaaacttcccgcatcccgcctttgctcccccttcaagataggtctccgagcttcaaggttttagggctctgtggaggccgccacgtagcagcaaggagaatgttttgtatttggctgatgagatttttagagtctcattttctacttttccactgtacaaacgggcctccaggcgactgcagcacccgccactgcccgtaatagggtgacaagagggatgaccctttcctctttctcccttctggttggtggaggcacggggctggcggacggcatgtgctttcgtgaattcaggccaaatctgttatcgcaaacacgattacaactcgggtctttgtgtaacaaaagcctttccaagtaccagctgttggcctgctttgctcagcggtgtttgctgtaaccagatttgcacaccgagaaagaatccaaaagtccttgatgtttgttgaaacaatctggcccaggacccacgtgctcagatcccagagctgtgtggcatctgagcttctcccgagcccccactgtcgcccgaggaggacccccagatctgtgttctggaggcagagcaggctgtgggacgggcttctgggtgggaaggaccatgtggatatgccttcttgtctgagagtcccaacacctccgggacgtgggagctggcgcgctggcaggattcaggtgcctctttcctctctagagaaaaaggccccgttgcttggtaataggtgcagacctgtccctaattaatgccagtaggcctcttgcgtgatgaaccctgcctttcagccaagactcaaggcatcctgtgaatactgcctctctgcagtttgagcttttgtggtgggaggcaggagccatggggagtgggggcaggcctcttacacgggtcccacagccactggcagcactgacttgatgctctttgagttcagagcccagggccagacagacccactgtcccgactacgagttggttcatttagaggggggcggacacagcacccaggcagcagatgcactgtgatcagccttgcagcggggctgtgggttctctgggctggatgtccgggaagaggcaggtggaggtaaacgccaggacacccctgcagtgactgggtgactgcaggctggaaatgctttctgtgggctgtggctgtccaggaaggttttgaatggggctagtggacagagtttgcatccagaggggcagtgctttggaggagtgaggggtatggcagtgtagggatgcccaggccgccctcactctgccattggaaagctgggcggcttcggtttcttcagtttcttcgcctgtttccctgcctgcaaagtggggttagaaacagctctctttgagggttgctgggggactctgagatgcagcccatggcgctgagcacgggtcctgcctcctacgggtgtggtgggtgtcgcggctggtgtggcatctgggcgggaaaagggggcatttgcaaaggacaggtaggtttggatgcttaaatatgcagatctggggatgggaggtctcaggcaagggcctgtgtgatgccactgtatgaatgaggccggacagcatggtcaccactaattatggaaagcacggcagacactagtgccagtagcgcccgcctgggggtccctctgagcccgacaggtactcaggctcccagtgcagccatgggaccccccttttcctgcctggctgacattctggaggctggcgtcatgttggctgcaggttcctcttactgggaggttgtcctggtcttccctgccaccatctacccccacccccaccctggagtgtcacagatgggtggaccatatgcccatctgcagggccaagcgctgacaatgaggtgagcacttgctggatgaccggaccatgaggacagcgggggcgctggcagcctgcgttcggctctgcaggctggcctttccctgaaaagcggttgtggcagagtgtgcatcccagggagtggtgcctgctgccctgaacattctcatccagcaggcctctgcaagggcccagtcaagtgtggtgcagagctgggctggcagctggaacagtctcatcttgtctagtggtgagaccaagggctgatgggccaaggctgcgtgctgcttgcccagcccgtggacccatccactgagcacccccatacccctacactgggcccggggtgtcaggaggtggaggggggactgggtgcctggaaaaacaagcccaccgagagcctgagcccccaggggtcagtatcaggcagtcaccacggtgcccggtacacagtggccacctggtctcgtcggctgtcttggtggtggagagcgtgcatggtggccgtacgtgatgggcatcacccagggtaatacagatatgcagactgtgcatttgtctgtaggagccagggacttctcagcctggcaacctgtgacctctgcctacccgttgggagagaggtgctgttccctgatagcctggtgccgggagagcagaactagggtctcctcctcctttctccacctcccatttcttacatgcccaggcatcaggggaggtcacactcagggatgagtcttggccactgggttcagggcctcactgttgccatctcttccctttgccagccagccaaatgcccgtccatcatcgtgccggggatggggctggcctgctcctctgaagtctccttggtgtatagcctaggctggagccccggacgattccgccaccccctcccccgactttttctttttattttgattcatcccagaaacccagccaaaaaccaagttcctgtgctctcccttgacaaagccactgaggaaaaatggtcaaacactgcctttctttccaaagccctcttggtttttcccaaatttggaggctctgagttgcttatgagaccaaagggtccggaactctctggaacacagtcccagaagtgggaggatttgtcatctctccagccaaacagacccaccagttggcccctagacacccccaggcgcctggggcatttctgggctcaggctgtttaatttggtctgcagagccccgaggctccgtttagactgggccagcagacagttctagagacttcaagtttgttgtcgtttttaaaagtcctgccaatgcccagaaacttagagggacaagaagatgacctcgatgtcagccgggaccataaacagtgaggcccgcccccccccccacccatgcctgcctccactgctcccgtagctgggtctccaggggattgcccgtggccatgggggaggccgggaatgcggggctcagactctactgggcttctcgtatttttttgtttttccttgtccatcttctttctcggaaatttctgaatatccccctacagcctttggcattctgtcactcctggcatctctgggccaactgggaaagccatcatttgtccaatatccagaaaatcaaggggcctggccttaaatacattgcagtgccctcctccccacatggcatcgaatttcctgtgtcctcaaagccaggagcctgtgccttggatgtgggcgatggagccttgcagacacctggagcggctttcctgggagagtctccctcgccttcccatccacccgcttcccctcccctgccccaagctctggtcacagcctcggaggggtcatctgagtgtaggttgcctccaggtgtacagttggaggggggcagttaccccacatccccctgtctgctaggggcacccccagggactcaggtcttgagggacagcggaagggtggggtggggagtaggccgttgtctcgtgccacctgggtgttatgtagactctgaatgggcagttcctgggagctggtttttccttctcaccccttctacagtgctgcccctctgaggggctggagctctctggagccctttgcagcctgtggcaggtctttctgattctgtgcctggtttcgcagcctccaacccatagccagtggcatgaagaacattcctggctgtctctacctgtggcctttgcaggcagcagttccctggggcagggcctgggggtcctggcacctccttgtgggaccccttgggtatgagggagggagccacctgggccacagatagacccccttcctgtatccaggaggttcaggatggacctgtctcatctttctttctggtgggaagagagcattcctggccatggggaatgtggcctggacagagccacctagcctctcccctcccccaggcagggccctgaaagatggagatggctctgctcctgccaggtcaacagccagcagtctggtggatttccatgcagtccaggcaggatctccttctgtccccaccccccaccccatgtgcaggaagctggttccaagcagggacccttggccccgctttccacgtgggtgggcagtttccctgcgaggggcaggccaggcccctgccctatgtcccccagagaccgatgttatctacagtaagagcatacaagtctttttggctccaaaccaggcctggaggggtggtcttctcctctgtcctctgcctcttgccccccattaaaggtcagggaatggagtgctctgtatgtttgctggggttgggttttttcctttggtttaaaatgaagggctggaatccctggtgcagactgcacggtgagaggtgctccttgggatccactcgaggagcattactgctgaatgccctgccaggccaggagcatcgctgggggtgggagaggcagttggcttatttgtttatccaacagccatccatgggtaccccaagggccagctctgttctaggcactgggggtctaggcatgggctcaggagaaggggtagaacgggagggcttcctggaggaaggcttcctaaccagagaccggggtaggagtttgccaggcaggtgatgctggccagcttctcttgccattttccttttctttttttctttttctttctttctttttttttgagacagagtttcgctcttgttgcccaggctgcagtgcagtggcgtgatctcggctcactgcatcctccgcctcctgggttcaagcgattctcctgcctcagcctcctgagtagctgagactccaggcacgcaccaccacgcccagctaattttttgtatttttagtagagacaaggtttcatcctgttggccaggctggtctcaaactccttacctcaggtgatccgcccaccttggcttcccaaagtgctgggattacaggtgtgagccactgcgctcggccttctcttgccatttctgcagactcatagtgtgtgtggaagactgtatgtctgtgcctggcacagctgccctcggcactcaggtgggaggtgggggagagggctgttggtgccagcacaggtcatggcatgagacaggctcccgcagccaagcggggtgcaccgcagcattggaggggccctgctgcgcacgagatccaggctctgcatctgtcctcctccccaggaggcctggagggctgggagggaccagggtggtgaaataacccaggtgggagagaggcactgttggagaggcagagggagctgcaggtttgtagcagcgagctttaaaccctgggcctccaccagaaaacctcagaaagggctgctttgcttttttttctaaactacaaaagaaacccttggccgcctgggccccttggggtcgggtgggggaggagatccttcattcgcacctttgcaggcccagtactgtgcagagggaggagggtggaggcaaaggcgagggaggagggtggaagcaaaggcggggtccctccctagccccgctgccctgcctggttgctgctctcagacccctactcctggcccggaaacatggaatcttgggacagctggggtagggggcacagaacggagaccctggtgagggaggaactctttctccagccctggctgtggccacagcaaggccaggctgggaggacctcactcaaatatttacatctctcctaatatttaaatgatgaagcaggctcctgcacacagctgccctggagccagctgttgcctgccctaccctccctctctccctccctctttctttccctccctctttctctccctccctccttctctccctccctccctcttgcattctttgtctctgacccaagtccaggcccttccagctgttctctccttacccacaggcacctcctgtgactgagcttctccttgttatttttcataaccatttcctttaattgagcacctcctaggtgccaggccctgggctggtactttgtatacaaggtgtcttttaatccccacgagagcccaacaaggtagattgggctgctgaggctccagcgctggaaggccggcccgggtcctcccagtccgcacctgcatccatccatcactcccccactgtggagacctgttccctggcccctggctgagcacgatggaaatctctgtctactagtccttggagagtggggatggctgagggtcccgaccctggggtctgacgggggctgcctctgccccacttcagcctggctgctcttccactcaatgactgagtttgcaaaaccagaataacagtgctacctggctggtactttgggtggctgggaggcgtgggagagggtgcacggaggggctgagcgaggtgtcagcatcgtggggatctccgagggtagccttcccaggcccagggcggagtgtaggcagagggcgcgatggcccagcgtgccggctcacatctggccttgcccttgcccacacggcaatgtgggggagtcatcagcctctcagtgcctcagtttcccatctgtgcaatggggacaagagtaaatcactgtcttcaggtatggtaagcactcatacacattgactattgcagaatgaacacagtgagcccttcttaggcttctactacatgccaggcagggtgccaggccctagtggagaggggacaatgatgggcaagctggctcctgccctcaagggctgtcgagcagggaggaaggcggcggctgccctgactgtgacccggagtggggtgattcgcaaagaggctggcgggaggctggctgggggctggctgggggctgctccctctcctgcctgtgttccgtggcagggtattaaactggcttttttcatggatttccgaggccctgactgtgggacctcgggcaggttttgggaccttgtgactttgttcccgcttgtcattcaggcctttgtcctcagcagtgcccagcacacggcgacttctgcatgtccttcagtgtgtgactgaccctggagctgagacttggcagctgaggctggacattgtccttggataactcccggggaggtgggggcagggtggggctgtgagctggcaactccgagtccctagcagcctccgaatggaggctttcctcttgtaggattctcggggaggaaggaggggatgggggagatgaggcttgtgagtcttcaggagggcagaggttcacacctgcagcgccccagaaacactccggggtgcccaggcttacccagccctcctgagccagaaccaccaagagttggggaccagcagtccattttttagcaagatccagaaatgattctcctgaacagtccgagccaagaatgacatatctggaatcagaacatcagaactacagaggaatcgagagaacgggcccaaaatgtgtagggacctcagccacatggcgccacatggaggaaagcacccaacatcatcactgtatgaacctgtttaaacacacacacacacacacacacacacacacacacacacacacacactccccagtaaagagtggaaagacatttgtcagaatattgatggaagttacctgggttgtgggtttatagattttttccctttgtttttgtgcattttgcaaattttcggctttgtgcctaaattccttttacagtcaggaacaaagcaatagatgttattttttaaagttcatgggctcgtgcccgtaatcccaacactctgggaggctgaggcaggaggattccttaagcccaggagtttgagaccagcctgggcaacatagggagacccccacctttttttttttttttttttgacagagtttcactgtgtcccaggctgaagtggcggtggcacgttcttggttcactgcaacctctgcctcccaggttcaggtgattctcatgcctcagcctcctgagtagctggattacagacactcatatttgtaggatttgagaatcctacaagaggaaagcctccattcggaggctgctggggacttggagttgccagctcacatattttttagtagagacagggtttcaccatgttgaccaggctggtctcaaactcctgtcctcaagtgatccatccatctcggcctcccaaggttccaggattacaggcgtgagccactgcgcccggccatgggagaccccctcttaaaacaagaataaaaataaaaataaataaaagtttactgtcaaaaagaaaaacacatcacccaacctaatctccccctaggattgagagatgaggaagcagaggccggaaagtgtcacattccctggtcgctggcagtcaggggacctgaggcctgggctggttttctcgtgctccaggcctggggtgtcaggtggagcccctgctttgcccaaaggtctaggtgcctctgccagcactgcttgcttctgcatttttggccacaaggaatgtgggccaaaggcagggtccttgacctctgcccaggagggtgaagtgggctggtcctccttgtccctgctccaaggcccctgcggctgtgcctttggaaactgctggcccgagctagtgtgcggagctgggacagacctcaccgtggccctcgtggggtcattccatgtccgggctggaagggatctttcggtccagcccttcctgttcctcatcaggaaactgagaccagagaggtcatctgcctggcccggggtggggtgtagatggcgcttgtgactcctgcatgccacgtgcagacagtccctcagctgtgggcttcccacgcaagcagccatgctggggataacttggctgaaacctgcgatttaatgaagagaagaatgactcctcctgcagccctgtgccccacaggctccctcctgcccccacccctcctgcagaggggcctcatgctggtgggtgggtccctgttgctgcaatgggcccaggcagtttctgggcagtggaggcttggctgtcttcctgcccaatgtcccctgtagcccacgctgtccgggaagggcggggaagcactcagccactggggacttcacaagatgggtatctgggagatgctgattggcaggccaggctcccgtggcccacaggcaggtcagaggtcacagtgctgagctgggctgagttggcagctcagggcagtgggggtgggggtaccttgctcagccatgggcctctctggcacaagggtttggagtttactgtaaacaactccttcagtttttccttctctcataggccaccagcagaattgaggggccctctgttgatgaggtgtggcctgggaggggctagttgtctgtccacctgatccttgcggacaggtgaccacaggcttcctgccccagggggctgggggaaagatcggggaggcctctctggcttccccacttggaaggaaaatacgggcataggggagacactttacagggacacatttcagccagtaccctctggctgtgctgggggcacagtgcctgccctgcccacaagaggggtcagttctctccaggatttaacttcagccttcagtgcagggcagatgagcactcagaggcccagaggactcatatcacgagagagaagctgtgaccacacaggcactgaaggttaagcagaagagtgggacacacgggtgacctgaaagtcccagggtcagtgtggttagccccagatagctggggagctttgggtaccaggcttagcaggggaggagggcccccgtgacagtttgctggggctgctgcaacaaagccccacgaactttgggggctgaagatggttctagaggccagaagtccaaaatcaaggtgtcgaccaggctgatcctttggggcctctgcgggaggctccggcccaggcctctctcccagcttctggtggctcccgggtgctcctgggcatgtagatgcgtcacgccactccctgctccgtcttcacatggccttttctctgtgtctctgtgtctcgtaaggatgcttgtcattgcatttagagcccaccctaaatccaggatactctcctcttgagatcctttattgcatctgcaaagaccctattccaactcctgtcacattcacaggtccgagggctagggctctggcatgtcttttgggggtcactattcagtccactgcggcagctgatcttaggggaagcagaatgttctaagcttggggtgagcggagggaacgctgctgggtggggagtgggagaccaggctcggagacaccgcggatctcctctgtctgatgagggcgtgatgaggttctcatctcaggtcctctgaatggcggctgcttctgaggagaccctttcccctggatctgcccctccagaaacctccacttaggtccaggtcccaaggtggatggtaagaggcggctgtccctgccacacttgatgggtgagtgtgtgaacggggctgggagcaggacacttgtcacttctgtggacagattccagaggctcatgaatctgctgctggggaaggtgcctgatctagcctgaccctccacccccacctcccccttcccgccccccttcaccagccctgttcccagagcttcacttccccaaaggcaggcgccgtttcctggacttctcagcagctaccccctaccccagacccctctcttgtaggcccctctggtctcagcgcctactcctccctgggcttctgcccctctaccgtgaggcttctgggcagaagtgtggggccccctcgctgtgtctggctctcgcggtataccaggggtcctcccaggggcccgccctgcccgctaggtttccagggagcttttcaagttcttagatgggcttgatggagtttcccaatgcgttgtctcagagcaggaggggccccggctgagtccgagagtcccctcagtcacaccctgggctgtttggggcagccaggcagcccgtcttctggaggtgctgcctctctctggttaccccttctggaatcttctgcgtccagttgcggcccctcctacacagcacacccaccacccccttttacctgtgactcttctttgtcaacctcttcatgtctttgagaatggagaccaggtcctcctcaccctggagttcagcagaacctaaaccaggcagatccgtgtaggttcacgtgggggctctgtggccactgtggctctgccgtcacctccagcccagcttggcgcgctttggatcatgtcattcagtgccggtcctccaaacctctcccctggctctgcaggtctgggaagcagctggctcctgggtgcagctgtgaccggagcctgaactctgctccctggggtcaccgtcccctgtaattaggctgcagctcatattggctcgggcagaggccatcggctgcccgccttggggccacaacacagagagccccgtgattaatggaggctccacctgggccaagtggcccctggtgttaggcgcttttttttttttttttttttttttgcattttttaagtgcttgtaacatttcccctaatggacaatgagacgaggagggagggaggggtggcttctctgcccaggcagatcaggaatggtcaccgcctgtgtgtgcagtgacaggtctgggaacagacaagggagagcttgtccgggaggctggaccctcacaccgatgctgcctgtgcctggcagctctgtcccgggcctcagaacagacactgaccaacacgctcctcagggtctccaggtccgggtcctggtccccggcagagcttcccatccatgggaagaagcaccgagcagccttgctggctcctcgcagggagctgggatgcatttctaagagcagcatgcgtgaagcccggggtctgggcaaaggagtgtttggggaagagtctgctgttgttggagggtcggaagtagaggggaaggaggggcacgcggtaggctgaggaggtggctggcgaccctgtggtggggacgagggggctatgagcagaccaggagccagcatcacgtttctctgtctccagaatcgaggacggagagctgccagagaggccctggcggggtgtctggggccacctaaagggcgtgggtggattaaagctgaggaaagcctcattttgggggactccgtacttaacctttgaggccctcagagctgcagcctgtggtttttcgaagtcaatcacctcccagggcctcgctcctgccttcagcgacagccatttatcagggagtctttgacccaaggagacctgaaaggtcatctggtccctctcctacccccaggcaggccacacctagaccctcccacacagatccgtcccacccttctgctgccttccaccagggacggagggtgggcggccctcccacccaggccctggcggccccaccccagccaggaaattcttcctctttatctgcctcacatctcttcccctgcggcttccgcccatttcccctcaatctgctcctagtggagcagccagcagctggtttagaacccgggggtggggggagcgctagaccagtgcagcacatctgagagtgtgccagaggtgctcccattcccatagctgatttagtaaagaaaagaggaagtccagcaacttagcgccactttaaagtccgcctggaatgaccctgtggctgccggaaccaggggcacgcggtagatgacgggagcaggcacagagaggccttcgtcccggatcagtcgctgttgccctcttggaggctgggctgcctttcaagaagaggacccaaggccctgtgagcggtggcctcctctggagcctttactgtggtcctggttctgctctgcgtaaagagagatggcttgaagcagaagctgctacgtggctgtcccaggcaggcgcccgtagtcccagctactcgggaggcggaggcaggagaatggcatgaacccgggaggcggagcttgcagtgagcagagatggcaccactgcaccgcagcctgggcgacagagcaagactccgtcttaaaaaaaaaaaaaaaaaaaaggagtagagaaatctttcccagaaggcctgcagtcacctccccttcatgtttcagaggtaaaaaaaaaaaaaactgcacatttcgctttttttttttttttttgagacggagtctcgctctgtcgcccaggctggagtgcagtggcgcgatctcggctcgctgcaagctccgcctcccgggttcacgccattctcctgcctcagcctcccgagtagctgggactacaggcgcccgccaccacgcccggctaattttttgtgtttttagtagagacggggtttcactgtgttagccaggatggtctcgatctcctgacctcgtgatctgcccgcctctgcctcccaaagtgctgggattacaggcgtgagccgccgcgcccggccacacgtttctgttcttgaacaggtggctccctgaccctgggtgtggttactccaagaccttgctctggtggggcacaattctggccccaggtagggcgaccgtataacttactgtcccttgggggacacgttagtgaaagggacccttgaatgactacggtgggacaacagatgtgagctgggtttgtcccaggaaggctggatgtatgggcctcttgagccagaggagacaacagcagaaagctctgcggctgatgggaccgagcaggagaagggccggcggaggctggggcaacaacgcacttgcccactgtgaagggcctgtgtgagctgatggctgatgagagggcagtggggcgaggctgcctcctgccaggctagaccagctccaggacacccatatctccttttcagaaccggtgactcagtggctagaaggggcttcagaattgacgggacactgagggagtcgaatggaatggctggagtggccacagcaggctctaggcctcctcccgtttcttttctgtgttctgttcctggggtctatatcctggggttgctgtaacagagtgccacaacctgggggcttacaaacatagcttccggcggctcctggagattcctggcgttccttggcctgcagacgcatcaccatcatctctgatctctggcccctgtctccacgtggctttctccccctgtctgtgtgtctttctccttttctgtcttttataaagatgctcaccattggatttagggcccactaaattcagaatgatctcaccttgagacccttaccttaattacatctgcaaagatccgttttccaaatgtgatcatgttcgcaggttccaggagttaggacttaagacatatcgttttgggggacactgttgaacccactacatttaataaacccagagttggtgccaatgtcccctgcggacaccatagcagattctggaggttccttgtaaaggaatccgtaggacttcttttcccttctggagggatgagactgtagctgggctggggaaagctgctggttcaagctggggctggttcagctggtgctggcttgccaggttgttagagagctttatccagggagaaattaacatcacaaagttgggggataagagaaggtttggaatcccaagggctggctgttgaggtcagctgcccacccctttgtgttccatcttacagggacccaggcctgccagtgctccgtttctggaaggaatgctgtgggctgctgtgccccataggcagggtggagggtccccttgcagccagcgagctgctcttcctgtagcgtgcagagggaaggaggaggcttgtttatttctcttggcctcagccgaaaatccaaccacaggctctggcactaggcagacctgctcattctcacatcatcattgcagagtgagccaggcctcttgggtggggctgtgatgagcaggaaggacctccggagtgcctgggacttcttgggcccagggttgccagaggcagagagaaagaagcctcctcctaacacttgagcaaagatagtcatcagaatccatcagagtggcctcctgtggctcttccctgggtgctgacccccctggtgcatttgaagttttcagggatactattgacgctccctgcacctccatccaggggttagtggaaatggttcttttcctccttgtccagaggtactgtggatgatgaccccaggtcccagacctcagtcattgggccacgtgtgcagataagcctgggcagtcagtaacctttggccaccaagctggcctcctgcggactgggccggcactggaggcgggtcttagctgctagcactgtggcccagccaggcctggccttgggaaggcagagggggaggggactgggaaagggattgagctgggggtggggtggtaccctggttcttccctcccagacctttggcaggtttgaactatctggctgcggctctctaaggagggagcgcctcctccgccttgatgtggactttgccttctgttcacgttgtccctgtccctaaacaaatgtggctctctgtggggagcctgggggccgccctccactgacactgctgtttcctggcttccctttgcaggctccgctcagcttcactgcgcctatttttaagcctttccttttggacggttttgcttcctgagaacacacccctccccatcaccccaactgtgtcctcctccctatccggagcctgctccacctgccccaggagccacctccctcctccaccaagcagcccaggccaattctggagggctaatttgtgtccctccagaagcaggtcctgagacagggatttcagtgggaggggacaccaggggatgcctgagtgtgggaatgggccaggcagggaatccagccaataaagggtgcctcaccagctcattgtgaccacaggtggctgcccagcccccataccgggcagcatggggagactgcagaccgtgcccccagccttgtcccacctggggttgggtaagggagctggggtttttatacttcagttcttggccaaggactgcactgctcactccttccagccttccgagggcttgggcactaggaaaggctctgggtggagacacggaaataggccatgtgaagtcagtgggcgtgattggtagcagtaaggccaggacagccttggtcaccagcaaggtgaccacacatttcagcatgcacagcccccacagacacacacccaggagatggtaattacaccagcaacagtcacccctgccgcgtgccatgcctgcacccagggaatcttattttttatttatttatttatttttatttgagatggagttgcgctcttgttgcccaggatagagtgcaatggcacaatctcggctcaccacaacctccgcctcctgggttcaagctattctgcctcagcctcccgagtagctgggattacaggcatgcaccaccacgcctgactatttttgtatttttagtagagatggggtttctccattttggtcaggctggtctcgaactcctgacctcaggtgatccacccacctcagcctcccaaagtgttaggattacaggcatgagccaccgcgcctggcctcaggggcaccttattaccccatcacctcctacagcaggtgacactgaggacactgaggctcagagtagactgtggttatgtcactctcctgtttggttctcctgctctcagccctgaaataaagagcacggtccctgtgcaggcccatacgtcctgtctccagccctggagcagtccttaagctccttgaaggcacaccaggcctttgggcctcgtcccccaagtcctggataaataggaggtgaaggagcctttgcaactggaccccactctgccagcgccaaggccctgcctgactacccaccccaccctacacagatcagggacctgtgccaaggtccagtgtcacaggagagtgaagacaaggaggtgcccatggcgtacatgctgctggactcactctgtagatcctaagggttatggggagttatctgccaggtgaggttttcccgtggctttttcctgcaggctcagggtagcatacagggaggtgcttccctactccttggcaccatctgtccggcttccctgagccctgaccctggctcctagatagccagtgtttcttcagggacagaacctgctttgctgctgctcagaggagacccagtttgaccagggctagcgttcctggaacctgagcctggaattccaccctgccctgggcagaggccacgttgctccctcctacgagagctgagctgcgcatgagattattctgaccttgggctctaccatttctttgcatgacatttgtcccaggctggagcagggctctgtggctcgcttggtgttccctccccagactgaggcctgatatgtacaccaggaagtgcttgatctggtttcaggagctgggagcggtttgccaggcagcctgtggtcagagcaggggccttaacaatggtcccttgtgcggcacattcctctctaaataggcccaggtccaggctgctcctgtttcgaccccgccatgggcctggaggggaaagtttgcatctggagggtggcccactgtggcctctttttgtgtagcagctgagaccgtaggtgcttgagaataggagaagccctgtgcccatcctgggctgtgagatgtttttccagaggtggggatggggatgggccagcatgcagttacccacaccctccagcttgttggcatcaaggtctgtgtatgtgtgtgtttttttttttttaattttgtttttccaacatggagtcttgccatttgcccaggctggtctcggactcctggctcaagcgatcctctagcctcaggttcccaaagtgctgggattataggtgtgagccaccatgcccagccagtaccaaggtgtgttttttaagagcaatattggccgggtgcagtggctcacgcctgtaatcgcagcactttgggaggccgaggcaggcggatcatgaggtcagcagattgagaccatcctggctaacacggtgaaatcgtgtctctactaaaaatacaaaaaaattagccagacgtggtggccgggcacctgtagtcccagctactcgggaggctgaggcaggagaatggcgtgaacctgggaggtggagcttgcggtgagccgagattgcgccactgcactccagtctgggcgacagagcgagactgtctcaaaaaaaaaaaaaaaaaagaacaatatcgatggttttattccctgaacatgctaagtgatccccatgtagtataagcatctcagaaggcaggaaaatgtaatgaacaacacccaccgccattcattccatccagagatcgttattttctgcccgggtgtgagtgtgtgtgtgcgtgcaaactgcacatgtgtgtatgaaatggaattaggatctttgtatacatcttgtgtcctgctatttttacttaatattctcggcatttctcatcttcaaaaatgtgattttaatgatggtgcaggcctttgacatatgggtttagaaaatctgcggaaacccggactgtttccaggttttgtcagtttaatgctgatgcaaatgtcctcgtacgtaaatctttctgtacttctgattatttccttgggataaattcccagaagtgggccaaagcacatgaacggtcttcaggcttttggagcaagttgagatcggtggggattggagaagggacccagggaggcttttgggagcttgcgagattggagtctggctttaggggacttgaattcacagatgaaggagatggctggcaaaggtgggaacctcctgctctatgggtgggggggtgacactgctttaccttccagtgacagcatggggatcctcccaacatgacctggctccgcatctttctgacactgtgcacggtccacagttgtgatgctcagctgggagcctcttctgtgtccttcagttgcattaactccttgcagacagaggaggaagctgtccggtgctcctccctgctgcgtgggtcctttgaatctgcccagttgggcctgtggatctgtgcagtcacgtacggggttctaaaatctgcaaaatgacaagctcacgaacactctcgcttctgtgggtgaatgtggataccccttggctgcgtctccctccacagggaagatggagacgtgtaaagtgacaaggacctgctacccctgggcaggttatgccggttccactgtgaggatggtggcagggggcttcccaggaggcctgcacattgggaagagaggggcgaccgtgtgtgactgcaggacccagggcgcagtcttaggactctgatgggggaggagatgctggggagccctgttctgccagcctggtgacagacatctcctaatgtttcccggctgggtacaactcacaatgtcctccgtggggaggcaattgcccatgaggcatccctggcagggatgatcttgtttcattgccacatatcccagcaatgaaacaagaatctagagtgatgtgattcctccgatgacttctccaaccatctggggtttttgtgcgactccaagaagggggaaggaggcagctctcgctcctctgggctcctgatgtggcagctctggaatggccacgtgtccgttggcccacagtgggccatttgtcgaatgtggttgtggtgggattggggctgggctggagagtgggtgaccacaccagctagcctcaccctgggccactgtgcagccaggggtttcatcttcccaggggtctcgttgtgagtgtcctggggctgctggaacaaattactggaaaccaagtggcccaacaaagattgattcgctcatggttctggaggccacaagtttgacatcaaggtattggcaggaccacactccctccgacagctcgaggggaggacccttccttgcctcctccagcttgcgttggcccaggcgctccttggctctggcagcatctgcagtctctgctctcatcacgtagccctccccaccgtgtctctttgtgtcccaagtccccttctgcctttctcctataaggacaccgagcactggatttagagcccatcccaaatccaggatagtctcatcccgggatccctaatcacatctgcaaagaccctttttccaaataaggtcacattcgtgggttcttggggttaggtattagacatgtctttttgggggtcactagtcaaccctctacagaacctcagacgaaagtgaatcttcacaggctgaaatgggggtgaaggtctagtgcgtccctcctccttgggagctccctcagggcttgtgcctatcctgtgatcctgtgatccagccttttttttgagatgaagtcttgctttgtcgcccaggctggagtactgtggcacgatctgggctcactgcaacctctgcctcccgaatttaagtgattcttctgcctcagccttccaagtagctgggattacaggcgcccacccccatgcctagctaattttttgtgtttttagtagagacagggttttaccatgttggccaggctggtttcgaactcctgacctcaggtgatccgcctgccttgggcctgccttggcctcccaaagtgctgggattacaggcatgagccaccacgcctggcatttagtaggttttggttgttttttttttttgagacagagtctcactctgtcatccaggctggagtgtagtggtgtgatcatggctcactgcagccttgatctcctggcctcaagtgatcctctcacctcagcctctcgagtagctgggattacaggcatatgccaccacccctggccaatttttgtattgtttagtggagtcggggctttgccatgttgcccaggtttgtcttgaactcctgggctcaagcgatctgtccaccttggcttcccaaagtgttggggttacaggcgtgagccaccacgcctggcttagtaggttttctagaagcgcctgaggcctggtgaaggcatggtgtcatggagtagagaacattcaactctgttcccggggagccggaacacacccctcgtagccaatctcaacagtcatgacgtggccaggatgacatggggagggggtggtgtggactgtgtgggaggccagctccccgggaagggggctggagtgggcttggctttgaggaggattcccaagaggaggaggaggcggtggcatgctcgtttggggggatggcgtgagccagggtgggcacctcttcatttaggtgtcaccttcttgacattccagccgggacatggtttccttggggaagatggacacccccagagtggggcatctcctggggaagatggacacctccggaatggggcgcctcctgttctcactgttcttctagcacacagttgtattctcttgcagttctggaggctgtgagatctcctggctgttatctagaacaaactcgcctttgagcagcgccgtcctgatggtggggtggcccctgcgggtggaacagcccctgctgtctcagagcttactgagagctagtgggcatgggagtggtgctggaccgaaacacccagagggatcatagagccaggcagtaagcacagaggccagctagtggggagggagggacccatccatgaaaagacaccaagcattgaaagagaggagaggatggttggggaccggcacacatgtgcattttgcgcagatggccaaggtggtgaggcgccagccacgcagacaactggaggaaggaggagtgccctaggggaggggccagctccggttctagaatgatccgcttgtgcacgtgggcctggctggaataaatcattgcatccgcaccgtagactcaatcgtaagctcacaccagggcagcctctgctttggtgcagtgtcttcgatcatgagttggccatggtgggggtgactccaaggggactcccaaggagggggttcaccggatctcccagggaaggtcatttgttttcttgggttggacctgggacaaggccttctcctgtctagtttctgttctccaacttgaccgcacggaaggatgctgaggacacctggaagccggcccctgctctacagcacccataggacagaggcacaccatgtggggacagtttggacagtgctcaggaggcagggagcagatcagaggaccgcgggaggccctgggaaccgcacgaggacccaggcattgagctctgcactttctggcatcagcccgatgtacagtctggctctgtgtctaccccgtacttcactttccccatctgtacgggggcggtaataatattctttacagcccaggtttaagcgggtgtagatgtgatgagcttggtaagcccatctcattacattcagttctgggcattgaaccctggactttctggctggtagaagtggacattcaacctttccttggggccctggggcttctgcagaatcagaacacagccagcagtttgcatgcagggtgcagagggacagagggacaccatgtcgggagcccacacctggcacacccctgactctggggctcagtgtcctgctgccctgcggccacgtgatcagctagaggtcatggctggacccataggcgaatacagcctgtggatttgattttgtttggccctgcggtgttttattttatttttagttttagtttgtggagacagagtctcgctctgtcagtcaggctgagtgcagtgacacgatctcagctctgcaacctctgcctcccgggttcaagcgattctcctgcctcagcctcctgagtagctgggactataggcgagtgtcaccatgcccagctaattttttatttttagtaaagatggggtttcaccacatcagccaggctgctcagtgttttaaaaagggcttgttttgctttgtgccagcatttaaagatcaggagatatcatataaagatccagatttctactctcttgagaagtgaacagctctggccacgccgggcccatatcctctagggcagtgacggagctgagacagggcctgtgacaactgagagttctctggagtccacacggctccttgcccagcttctggtggaggttgagcttagtgacccaggatttcgtctgtgtccaccaagaaggagaggtgcctgtggcttagagagggcgcccacaggagtgccttgcccaggaagctggcagctgaggcggccagggttagggggttgggcttcctcttcccctccccagtgcctgagtgcatttggaggaagagagacgggtgaggggaaggcactgaaattggtcctggagcgctattattgggggctggggaccagctgtcatcccttttcctgtgggcaggggaggcagtggtgggatcccatgagacccggactctgtggcctggtgaggcagggagcggctggggagacactgtgggtctccacaggggtgcgctgtgggtctggcctggggaaggagctggtgaatgtgcctgccatgtgggtccctccctgctctggccctgataaccaggagcggctggctctcatttggagtgcggttgtggggactgtggaggtggcagcttcccaggtaccatccccactgcctccgagggagcagaccctggtggagaggcaggatggctgcagggcgggagctggtggttggcatcactgcacgggcttgtagtagtggatgggaagatgcaggagaggctgatgactgagaaagttggttcctgtggactaagctgggggagccggacaaccaagtggttagaaccttgggctctggtatcagcctgatgtacagtctggctctgtgtctaccccgtgccccactttccccatctgtactgggggtactggtattctttacatcccagggttaagcggctgcagatgtgatgagctcggtaggcccggcgcctcgccggcactgaaagctccagtgtccgcccttagtgtcattgatggggttttgttcctgctgcggttctgattggttacagttgcggtcacttattattggaggcatgtcccccgctgtggctgatggtagaggtgtgtttgctggtggtgtcccagtgtgtgccttggctggaggtgaggagggataaaaacagccgcgacaagaaggaaatcaaggccgggcacggtggcgcacgcctgtaatcccagcactttgggaggccgaggcgggtggatcgcttgaggtcaggagtccgagaccagactgaccaacatggtgaaaccccatctctactaaaaatacaaaaattagccaggcatggtggcccgtgcctataatcccagctactggggaggctgaggtaggagaatcgcttgaacccgggaggtgccgctgcactccagccagggcaacagagcaagactccatctcaaaaaaaaaaagaaggaaataaaagtcttctctggaactagaacgttcctatgtagacgtagctggagggggaggctgtgtggtttgcgccgtggccatggcaagacacgacgggcagcatcttcccactccagcctgcatctctgccccagaactcatgatggttctcctaggatggggctgtcccttccgcttgctgagacatgaaggacgggaagagacccccggccctcaccgccgcatcgcctgccttcctctgctgctccttagcaggaaacatgccggagtgttccctagccatccattcaccaattgcatcccctctctttatttttcagccttgaaaagatcttttgaggtcgaggaggtcgagacacccaactccaccccaccccggagggtccagactcccctactccgagccactgtggccagctccacccagaaattccaggacctgggcgtgaagaactcagaaccctcggcccgccatgtggactccctaagccaacgctcccccaaggcgtccctgcggagggtggagctctcgggccccaaggcggccgagccggtgtcccggcgcactgagctgtccattgacatctcgtccaagcaggtggagaacgccggggccatcggcccgtcccggttcgggctcaagagggccgaggtgttgggccacaagacgccagaaccggcccctcggaggacggagatcaccatcgtcaaaccccaggagtcagcccaccggaggatggagccccctgcctccaaggtccccgaggtgcccactgcccctgccaccgacgcagcccccaagagggtggagatccagatgcccaagcctgctgaggcgcccaccgcccccagcccagcccagaccttggagaattcagagcctgcccctgtgtctcagctgcagagcaggctggagcccaagccccagccccctgtggctgaggctacaccccggagccaggagggtgagtcgcagagcgctaggtcttggatgctgtggtaatggggggcctggttgctggctttgccacagaatcttggaggaagaagctggatatggggtggagggtgctaccctggagacccagaaagaccggaatgcatgggggtgggggtctgcaagctcaggagaggtggctctctctgtctgatgggaacatgccaagatgccccaagcgggacttgaatgagagtttggaaagattttctgggtttcaaggagcctcctttatgggtcaccgtgggccttgctgggacctctgtctgctgtgtgtccctggagggcctgggaggcttagagaatgaggagccacgcaggaaccagggcaggctcatgcaggggtgtaggacagggtggagttgagacccctagaagggctgtcacattctggtggctcctgcttgaggaattgcaggctgcctggatatgcccagcagaggccgagggcttggggaagggaggagggacgtatgcctcctgaggcttgcattggagcccatggtctggtcctcctcccccaggagggatggttgtggcagagggaggggaacatgaggagcaccttagcctgcaggacaaaattctcagggcactgggaaggggtgcctggaccagggggctgtgtgatagctgcacacggttttatttgggggtgcccttctggcgagaggagagaggccatggggctccagcagcgtcctgggagggctcaagcccacagccgtgctgacatggagcttacaggcaggggattggtgccagtcctgtgggacacagggcctgtttggaaatgccaggctgtgggacatggttgggtcccttctcagaagcgtgccccctggccccagcagggatcgtggctccatggggctatagtaaggtgccagctgggttagaagcccctcaagagccaggtctgattctgggcacaggatcagaactcagtaatgctcagtaagccttctttaggttggacaaacagcacagtctgggtttttgatttagctgctgcttcttatttctaaccgtggtgaaatacacaacatacaatgtgcaattttagccactttgcagtgtacgtttcagcggcattcagtacattcacggtgttgcgcagctgccaccgctgtccatctccggtacccttttcatcctcccaaactgagctccgtccccgttagaccaagctccccatgcccctcccccagctgctggcagccaccattctattttctgtctttattatgaatttatttgaccactctaggaaccttgtgtgtgtggaaaaatacaataactgcccattttgtgtctggctcatttcactcagcatgacgtcctaaaggttcatccgtcgtgctgtagcatggggcagaatttccttcctttcagaggctgaataatattctgttgtgcgatgcacttgtgttgtgtagctgttcctccatcggtggacccttgggttgcttccacatctctctaagtccctctttccatcttctttgacttttctttgacttttttgagacagggtcttgctctgtcctccaggctggcgtgcagtggtgtgatcactgcttactgcaacctctgccccctgggctcaagtgattccccagcctcagcctcccaagtacctaggaccacaggttgcgcgccaccatgcctggctaatttttaaattttttttgtagagacaggttctcactaggttgcccaggctggtctcaaactcctgggttcaaatgagcctcctgcctcggcctcccaaagtgttgggattataggcatgagccacccaacccctttttggtttttctttttgaatgagagttctccagtggtcagtgggcttgggggctgggaggatgtggggcctggagagggtgtgggtttggggggagaccagtgctcctcatgctttcatgggcatgtggagtgcacatttgtcttggcgggtctggggcctgggactctgcatttcctacagagggggcatcggaacacactgagtagccagaggctagtgggccttggaaggtcctttccggccctcagtgtgcgagtcccgtgttccctctcccatctctctaagcttgactctgaagagccaccctgccccagccacccagactcagtgacagtggttgctggtggcatggtgtcaggccaaaggcatgggcagtttgcagagtggcaggaggctgtttcctcccctgccttctgttggtgcaggacctttgtttgacgtgccggatacacccccatcctgggttgatgtgttcacactcagctgagtcaaacaggatgtggctggggaggcggttgtcaccgagccatctaaatctcggtgatggctggtgctggatgcacagggacgtggtcctggctctgggggacaggtagggggatgtccatggggatgtacaagaacattctcctccaggggcagacacagtttagcccctaaattgtgccagagactgtgccgggagccaggcccagggacacaacctgcgggctctgctttctggagctcaccgagccgtgagcaggatggctgggacacaaggagtgtccagggagcttccccagcagtggaagtacaatttcatcaggccaggaaggggagagaaaggcaggccacgtggaggcagcagcgttcagagctgccaggaacctggcgctctggggggacggtggctttctccatggaataggatgtacacgttggagccggggcatgggagaaaaccatcagcatcccagacccggccacccacggacagggacctgtgcaggtgggagtccagctcacgtggagaggtccgtgggctgggctgacagtcctgagggcctaagcaagtccaggtggaggaaatgcagggacagacgagggcagggccttcccaatggaggagtgctcttgaaatccgatgggagtggcttctcggggggcccaggcctgagccccactagttcttcctccgaggcaccacctgcttgcttctccgtcctccctctctgtgtcacgaccgttctggacacggatccagttctctccaactcagcttcctgcccatctttccttcaggcccatccccttctgcccctccatgtggggctgggctgggagttccctgagccccgacatgcacagctctgaccaatctctgcggcccctctgtcccccgagcaccagggatccagctggcaccatggggaaaggaatcatggagggagttccgtgccctctgagcagacgcccagccccttggcttctgcctgcgggagggcatctgtgctgtggtttgtctccaccccagagctgtgggtgcagggcagggtctcctggggccccagctgaattgctcccagactgacttccccaaagcacagcactgctgagatctcttcccgtgctgagccttctctgctcactcaccataggcccctccacggttgattcactctcctgctcagctcacacctctctccttcccagcttctcctgctttggtcttcccttggtctctcacacctttcctcacaacccctttgccctgacctcctgaaccctgacctctgcttctctttacatcactgccttggtgaactcctatgcatccctcaaaacctggtccaaatacctcgtgtttggcttgggatataaatgatttgtgtataaactttctttcctctgctagacttttttttttaaatgtgaaagtagtttttcagatcataaaaagtaatcgagtaccctttctttaaaatgcaggaagtacagaaatgagaaagaacctaaaattcacctgtaagccagcgatatccatgcttgaggttttgctgtatagtcttcaaaattcctttcatgcccccactagattctgagggtagggctgttgtctttgtttttttttgtgttttttttttgttttttgttttttgagatggagtctctctctatcacccaggctggagtgcagtggcatgatctcagcttactgcaacctctgcctcccaggttcaagcgattcttctgcctcagcctcccgagtagctgggactataggcgtgggctaccacgcctggctaacttttgtatttttagtagagacggggtttcaccatataggccaggctggtctcgaactcctgacctcgtgacccacccacctcagcttccctgacctcccaaagtgctgggatcatgccaccgtgcccagcctgtcttggtttttataaagaatcccataaggggccaggtgcagtggctcatgcctgtaaatccagcactttggaggccgaagcaggcagattgcttgagcccaggagtttgggactagcctgggcaacatagagaaaccctatctttacaaaaaatacaaaaaattagccaggcatgatagcatgcgcttgtagtcccagctactggggaggttgaggtgggaggaccacctaagcatgggaggttgaggctgcggtgagctgagattgtgccactgcactccagcctaggagacagagtgagaccctgtctcaaaaaaaaaaaaaaaaaaaaaaaaaatcccataagataccaagtaagtgacttggacataataggtgtgccatgaaattatgctgaaggagtgagccactggtggtgagttgggatggcttttttgtggttcttgtaggcagatgtagtgacccccatgggtcgtccctagagaccaagcagaaactttcctggtcaactttacccccaggacacctggtctctcctctggaggttgtgctggagggctcagtgggtgggtgttggcttcagtgtgggggttctggaaggagtcagcatttcaggagggagtgtgggcacctagatggttgaaggggagggagaggaagagaggcgctgcagagggcagaggcatccctgcctgctcctccgccccagggcctggtgaggtctgagctttatgctggtggggtggattctcggtttccgaggctctggccctgcccctggacttggcaccctccttgctgtcctcccacagaagggcgctcatcctttggggtcatccctggtcctctcaggctctgggtggggacggccttgcctcctctcctggatccctgctcttttcctgccccccaacatgggtgcctctgggtggagtggggtggggctgggctgcagcacccagtactgagcctgcaagggctggctgctggctcagagccccccccaccagagttacccccctccggctcctcagccacaccagccaagtttctccagagctgccttataaggcgggtgctcagcgctcgttcatgggtctggttctctgccttcttgggatgctcactgggggcaagagggaggccaggcccagtgcccagctcagttctgggcatgtcccagctctgccccatgagtcaactggttctgaactatcattccacccctcccagcctcaatttcttgatctgtcaaagaggcatctgcagaggtggctgggggctgagctctcatgtatccacccaccccaagaaccaagaagggagtccacagtggttctggggccacttgtgaacatggatgtgaaattggggcggggtagacatggcagcatgtctcagtagttttcctgtgacccagagggtctggaaatctttgtcatgtgggtggagcgttgagggagcagggggtcaggcccccccgagctgatgatggtgggcgtggctcttcgcatacttggtccgcaccgggccgtgtgttccaggggcagaacagggaggaatctcagcacagacagcagggctgccagtacagcgttgagtatagggttaatcaaagcacagggctccctggaaccacccaacacagagcagtgaagaggtggctttggggaaagtggggtcagagctgagcctgagtggggggtggggagggcgggcatcagcctgcaagggagggacacctactgggccccagaagttcctggtggggatcagggactgtgaagttggggagagggtgaccactgtgatttagggaggaagggccccatagacagcccagcttctggccccgtgtttacaggacaccccacataggctctgagcctatccctggactgtggactccctgaggcagggtgtgcaggttcgtccagtaccaggtgtaaggcagggggccttggtaagcgtcgagggactcactggtgtctgatgaagcagtgagtttggatcgtgtcatgcctcgggtcctgagcctgcaggatttttctgtggggctgtgtgcttctgcttctggaggtgtccagaaggcactgacgttcctgccgggatgccttactcggaaggtcccgctgctcccacctcctcccattttcctgagctgcttgcagagggcacccaggtccccttttactttgggattgggtctctttctctttccccttctaagaacaagtaccctccttctccgaactgtccctggagcctctcagacctaggtctagagtgggaagtcccgcatgtgctgggggaacaggaatcaatgcgggaggattggccaggcccggtgtgtctccttcgtggtgggacggggtggggccagagaacagagcctggctccagagcccaggaagagaacccctcccctcgccggcctgccaagcaccgtgcagtggtgagaggaaaggagggctggtccgggaatgcagcgggtgccgagcagctgtggaataccttaaatagagcgcagctgcggggaagggtggggccaggaggcaggcgctgggggcggtttctctgctccgccccctgcagctctgtggccctgaccacccagcctggccccaggatggagccccggcccccagacacatggcactgggtgaggccgcctctcagcacttgtcccaggaagtcagagcagctgccagaagagagaggagctgtgtctgtacccgccgcctcccaggcccgggacagctgccgggattgagggtctgcacaatggcgagcctgtccggaggggcgcgccgcggccagacagccatgctctgtgcggtgtggacagagggcacattcagccctggaggagcgcactcagactccccgcctcggggcccaaagtgtgggcagcccctaaccagaccctggattccagcagacagcctgggaggatgccatgtggtccaccctgacacactgtctcacctgtgacctcatttctgagagctgcagggaggcgcttcctcagttggactccacttcctctccggggttttctgtgggtgttataagtgactctgtctccttcagtccaaggggggctcctggggtatgggctgtaactgacaggctagagtagcccatggccagggctgagcttccttcccgttctctctgaacactgggcccaggaaggggttaaagtggagatgctctgattaaagttgagggaggcatggagctcccctgaccctgtccccccatcccactgctgctactgggtgtactctgtggagccccaggactcttaaagaacccagagtggagattcccggtctcatccagtgcaggtgagggggaaagtgatttgtccacagttacatggctaccatcagcacacctgggtcaagctcgattccactccacggcccctgtctgaaacctggaactggaaatggccctggaaatcactgattccatctgccgccttccaaaatggcccgcagaggttaagatatagactcctgtaatgccttgcccactcgtgtgtggggaaatggcagaggagcaccggctttgccctcacactgcctgggctgccgcccctgccctgcctagtggctttcctctctggtccgttttctcattgtggaagtgggcacaattcttcctgtgcagcgtggttagagtggacagtgatgattcgtgaagcagggtggagcgcctgggggattcgtgttaaacaagcacataaacaaaagccaacacaacccttacttaatcagcaagcaggccttgtctgaagcccctgggcagcacctcatgccatccctaggttccaggccggtggtgtcgccccgtgtctctctcacccgcaagctggtgtttagaagccctgctctgtgttctggctcccattctccctgtgacctttccctttcttcatcctaaaaagcaatgcacgacggggcgtggtggcgggcacctgtagtcccagctgcttgggaggctgaggcaggagaatcacttgaacccaggaggcggaggttgcagtgagctgagattgtgccagtgcagtccagcctgggcaacagaacaagactcccatctgggaaaaaaaaaaaaaagcgatgcccagtcattcttagatagaaaatgaagatcacatgaaatttggaaagaagtttttctctcccattccccaactctctcccaaggggtggccatgttgacagctgggtgtggcattctcctgaattttattcctgcagagtcattcagggcttgtgtaaaaaaagtcaatgtgtaaatatagacttttcaagaacacaaaggaaatcagacttctgctaccagcttttattttttccatttaacaacactgttgccacttgtagatgtagcacgttcctttttctttttctttttttttttttttgacagagcgtggcccaggctggagtgcagtggtgcgatctcagctcactgtggctcactgtaacctccacctttcgccttccgctttcaagcgattctcctgcctcagcctcccaagtagctgaaatcacaggtgcttgccaccacacctggctaatttttgtatttttagtagagacggggtttcaccatgttggccaggctgctcttgaactcctgaccttgagatccgcccacctcggcctcccaaagtagcacgttccttttaatggttgtgtcatcagctgtcccatggccctgccaggcttgtccagcttcccactgtgattgagaggctgcaacagatgttctcgcacttgtacatgtgcacacatgactgaaggatgagctcttagtgaatttctgtgtcaaggatgtgtgcatttaagttttgatctgctgggcacagtggctcacacctgtaatcccagcactttgggaggccaaggcgggctgatcacttgaggtcaggagttcaagaccagcctggccaacatggtgaaaccccatctctactaaaaatacaaaaattagctgggcatggtggcttgtgcctgtagtcccagttactcaggaggctaaggcaggagacttgcttgaacccagcaggcagaggttgcagtgagccaagatcgtgccattgcactccagcctgggtgacagagcgagactccctatcaaaaaaaaaaaaaaaaaaaaaaaattgatccttgttcctgaattggcctctaaagtggttactagaattttttaggacccctcccctcgtcgacctgctcagctgtctgctgggccctgtgcagtgatggtccagcagggaggtcctatgccccttacccctggctgagggccaaatgctctccaattggtgttttattttgtgcatctcggtcaagcgagagggattatctcttcgtatgttataggccagggccctgtgttctcttttcatttggaaggtgtatccttttcttgttgaaattttttaaaaagagttctttgtaagccaggcgtgatggctaacacctataatcccagcactttgggaggctgaagtgggcggattgcttgagcttaggagttcgagaccagcctaggcaacatggcaaaaccgcatctctgcaaaaattagctgggtgaggtggtgcgcctgtagtcccggctactcgggaggctgatgtgggaggatcatttgagtctgggagtttgaggctgctgtgagctgtggtcataccactgcactccagcctgggtgacagagtgagatcctgtctaaaaaaaaaaaagagttatttgtacatctttatcacagcaggtacgagtatcttgtccccagctgcctacttttgattttgtttctgggatgttcttctacacagaacattttaatcctgatattgtcaagtctctgctttcccttttagcttttggaattcacatcctgtttagaggtctcctgcgttctgaaattataggaaagaatttcacccacgttttcttctagtacttctgtggtttcatttttacatgttgaaatcatgaatccattggaatgtattttggtttcagcagcgaggtaggggtagatggtattgcttggatacacagcagcgagcttggtctggagcgggtggggcgtgtgtgtgtgtgtgtgtgtgtgtgtgtgtgtgtgctatttttatcagttttggtgtctgcattgtgctggcttagcaaaaacaatttggatgcatttcttttaccctctgccttctggaacattttaagcagcaacataataatctctctgttaaaacttttcaagaattcactcgtgaaaccatctgagcctgatacttttgggggagtctagcactttaaaaacttaaactttttccatgggtctgtgagtttgggagtttttctttcttcttaaaattcattactatttttttcctagaaaagtgtcttttagcttatttaaaatccgtcagcttattccgagggggttgctttagctcgcttagtgaggacagtgtgcagcgcggtgattgacatgattgatcagcagagcacgatcgatcagtcggtgtgcaaacatgactgactgtggccagcgtcctgggatgctccatgttgaggcacatgtgtgcagtgcagggtgatgtgtattctgagaggggatgaagccacaggacccctgcacccttaggagagagcccccctccccaaggctgcagtcttgagtaggtagtgacgggactgggtctagggggctgagtggtcccagcaggccaagggcttcaggaattatgagaagtttggagttgcccagagagcagctttcaaaaccagtctggactgcagcctccagaaagacatgcgattgacaccacgaaccaggacacacctatatatggggtgggggtggggatgggatgtattaatgaaaccaaatttccgtgatggaattcttacctttaccatgcgtgtgctacactcagtattttctttttttttttttttttcccctctctctttttttctttttgtttgtttgttttggagagagggaaggctttttttcatttttttttaaacagctttattgagatccaagtaagctactatacaatccaccaatttatttatttatttatttttttgagacggagtttcactcttgtcgcctaggctggagtgcagtggcgccatctcggctgactgcaacctccgcctcctgggttcaaccaattctcctgcctcagcctcccgagtagctgagattacagacatgtaccactacgcccggctaattttgtatttttagtagagacggggtttctccatgttgaggctggtctcgaactcctgacctcaggtgatccacccgcctcagcctcccaaagtgctgggattacaggcatgagtcaccgcgtggcccaatccacccatttaaagtgcataattccatggttttcagtctattcagagagtagtgcaaccatcgtcaccacaaccaattttagaaaattgaaaatttgagaaatttagaaaatttttttcttaagaagaaaccccgtagcctttagctatcaatcctgccctcctcctccatatttccttcctatctgtgtggattctttttttttttttttttttttttgagatagggtctcactctgtcacccaggctggggtgcaatggctcaatctctgctcactgcaacctccacctcccaggctcaagccatcctcccaccatggcctcccgagtagctgagactacaggcctgtgccaccatgcccggctaatttttgtattttttgtagagatggggtttcaccatgttgcccaggctggtcttgaactcctgggctcaaatgatcctcctgccttggcctcccaaagttctggaattacaggcgtgagctactgcgcctggccgattctagacatttcttgtacagagaattgcacgtttggcctttgtgtctggcttctccacttggtgtcatgtttccaaggtccatccacattgtggcaggtgccagtgcgtccctgagtaatattccaccatggcatggaccattccattgtggacagacatgttgccttcatcagctgagggacattgggttgctgccaccgctggtgagtgtattcttttcaaattaaaaaaaaaatgctggtcaccacccactagatcgttttcttggcccacagggtgggacaagccggcctgggtgagggccaggaggtggccaggtggaggcggctggagcggccctgggttgcctctgggcgcagcaggcagaggtgcaatggcagagtctgagcaggttccctgggcggatctccatgccggtaatgtttgtttattcaagaagtctcggccaggcgtggtgcctcacacctgtaatcccagcactttgggaagttgaggcaggcagatcacctgaggtcaggagttcgagaccagcctggccaacatggcaaaaccccgtctctactaaaaatataaaaattagctgggtgtggtggcgtgtacctgtagtcccagctactcggtaggctgaggcaggagaatctgcttgattccaggaggcagagcttgaacctaggaggtggaggttgcagtgagccaaaattgcgccactgcactccagcctgggtgacagagtgagactatgtctcaaaaaaaaaaaaaaaaagaaaaaaaaagaaatctccagtgctgccctgtgcccggcaccgaagccgagggaaggcagcattagtatgagctcccagcccaccgggctcctgtctggagctgacgtgcgaccaaggcacacgagggaagcatggcgaggtggacggtgcggaggcataaggagcaaaataaggcagatgcagtggctcagtggctcctggtggctgcgaggagcgtgggcaggacagccccaggagggcacctggagagcagggccggctggggcaaggtgtgtcaggcacttgtcaggagcaaaatgtaaggggacaccaaagagctcaggaatcaacacagatagtatttaatgcagtatttttcaatatcgaaatgatgcatagtaatctctatgatgaacaaatgttggaattttaaattaagacaggcccagccctgcacgtgcacagccctgtcagagtttgttcagcgtggaatttgatttgtttaaaatgttgcttcaaaatattgtttgattcctggattttttggcactgccttaacttttgcacctggacgaaggcctcaccctaatcccagctggagagggtcaagggctggtgaatttggctttggacctgcagagcttgtggtacctgagaggtggggccaggaacaggaaggagctggtgagaacggcacccggtatgggatggggccagatcagagcagcactgtggctctttccaacccgtggttttgctgctggatgcttggcgttggtgctgagcccccggccctctgaacggagtgtgatgaataacggggccggggagctcttgggcccctccctgaagcagcagtgaagccagggacatgccggcagcaggcagggagagggacgtctggtctgtgcctggagccagctgccccatggaggagctgggtgaggatgcggtgggaggaagaccttcccagtcctgcatcctccgaagcataactgagtgcttgtgtggcttgggggtcactctggtccgaggacagtcttgctttgcttagccaggctttgaagagccaccgggatacggacagcagccctgctgggtggcaggttgtccaccctcgcccactcaacgctggaactggatgcagagcacctggatggccagtcccagagtgtctctgacactcccagtcacctcatcccttagaccaggataagatgcgggatcccaacctcgagcctcccatgggctccattccatgtgctcccataagccactgggcccacctcctggctccagggctgtctggccatttggcatcttggtttcctcatctgtacaatgaaaataatagtcccagccttctcgaggagttacaagatgcctttcgtgtgaaaaactgggatttggtaccagactatctggatttgaattttggccctacccctcctaacctgtggctttgggccaatctggcctccctgtcctcagtttccccatttatagagccatctcattgagttgctgggaggatgaacataaggaagtgtactcatgtgcccagagcattgtgattttacttattattaccaaacgaggcacacaataagtgcctaatagatgctcagtgtcatttcacggattctgtgtgccttgtgtgtctccagcagccaagctctggaggtggggaagctgttgacgagttgcacgaggtaattagaaagaggaggccacaggtgcaagggtttgggtgacacctgtggacagagagaggccgatggaccctggcagaggggaagggggcccttgcacatagaaaatgtttcctgcatccaagatccttgtgactctggaacagaggcagcagaggtctgcaaattccaaatcataaacccagaaagcatagaacattcgtagagaggaccagaaacatcatatatcttagtgtgtatagaattttccacatagccaaacaaaagcacgtttctaactgaagctgttggagagttcctgaggactttataccagacaagggccggtaagtggaagttcaatacgcaggagccattccttttgttcacaaatgtttgccgtcttttctgtctatatccgcattcatgtgagggcactcataggtccaccgtccagccccatgctttgtttgctaccaaaaaatttcttaagaattcctcagctgcaaatcctcctaccggagggggggttccaggaacccagccttgctcggggttggggcacctcagcacctgctgcacaggcgttggtcattaaaggtcatgtgccgtatccgtgggccctcggggtctggtggcacctgggcacacagtccagtggcggcctcctacctgccagacactgggagtggggggctcctcattcctgttccctggcggtggggggagtgccccgagctgtcacacatcagaacccaccgactcacacgttgcggcaccttacagccccttgacagcctctcagcctgagagaccatcaaactgagttcctggagagggtggctgttgaggcctggacacaggtgtggacaggatagccctgcctcatctcggagtcccgctccggttcagcctcttgtgggtctgaagctcaggctgggccagtccctgcccctcagatggccggaaaggcagcccagccccacggcctccttgtcaggctctgagagccgcctggcctccagctctgctctttttttttcttaagatggagttttactctgttgcccaggctggagtgcagtggtgccatcttggctcactgcaatctccacctcctgggttcaagcaattctcctgcctcagcctcctgagtagctgggactacaggcgcgtgtcaccatggcaggctagtttttgtatttttagcagggaccggttttcaccatgttggccaggctggtcttgaactcctgacctcaagtgatctgcccacctcggcttcccaaagtgctgggattacaggtgtgagccgccacgcccagcctccagctctgccttgattttctcttaaggccgtgaggatgtccacgcctcctcctttcctcacggcccattgatgtctccagatgctctgcaaagccaccctcccctcgggagctccccagctggtgacgggggaccttttggggatcactgcccaggtagtcatgtaggtctgtgggccgtgcttccaggctggaccgagacccggtgcatggggtgcttctggtctgagctgaggcccctggaagccacagccaggaggcagcaagggacggctgtcatgtcccctctcccctgtctcccagggtccctgcgggacagatttccctgcctgagcctcctggttgcccataccctggcctcccaaagcccagcctgaagccttaggcaccctacaacctgcttcctctagcagcctgccctgtctcttctctgccgatgttcctgaaactttcctgcctctccttacctcttggccagagagagactggagaccctgtgggaacccccgaggggagggagaaggccgctgtttgaacggaggtggtctttccctctgcccctccccaggcgggtcacacttgcaggcccagcctcctgctgtggcagcgcttggggtgtcggctgcctcctgggcacgagttgggagctgagggaggcgctttcaggaccggagtggcaacccagctggaggaggagtaacaggcccgtggtcagcagcagccgccgcagggaccccggcgctgtacctgtgccccagctgacccctcccgcttccctagggtgggccggggatggtggtctgttgcccagcccaggaagaagaggggccgtaatcagcagcagccacctcaggggaccccagcgctgtacctgcgacccagctgacccctcccccttccccagggctggctgggaatggtggtctgttgcccagcctaggaggaagaggggctgtggcttccactctagaggtctctctcccggtccctcccccggtgctggtctaactgcaggcctgccttaggccgtgccggcacctgctgactgacgcttagcggatgctgataggagagggctgggatggggaagcagcaagtcccggtcactgtgggctcgggttacagatggttgaggcacctcctggccatccccaggaagcaaggccccacgcagcctccgactcacccactgcccgtgtgtatttcaggaggctgcatcccccaaggcccccaccaggtaacttcattgggctgggtgtcgctgcaaaaccacccattgggtgcggtggtcttctggtggggggcatggctggggaggatgcggtggaggagaagccagctccgtggttggggggagggcggactatccgtttcctgtctgtcccctgaactggagctcatggtccctcccccaggtgcctgggccatggaagaggtcacagccctgccttattcctgtggcagcctaggggagccctggccagtcccgtgtctcctgggagggcgacagcctggtcaggctgcagggcaggactggaatgcagacccctgcttggccatgctgttgcctggctgctctgtctggggaccttctgttcaggaagagagaagcgggccggacagcccggctcagtgattggaagctcagctccccatgttcagtccagcaggaagtttgcctcctcggaacacttgcgtgcttctgcatgtgtcttcttggctggtggttctgcgaggcccctactgggctgcgtcatgtcctctggccaccctggccttggtgcctggcccctgtgaaacagagatacctgggcagtcccccacttgtgcttgcaagcctgtgtggcttcagtgatggctgattctgctccacccagaggacctgggaatcctcagcccaactgtccagaggagtctttctcagtggggagagcctgagctgtcctcctggtggacagtcctttagatctcaggcggacttccctgccggccgttcctcctgctgcccctgctcctctgtcccccatctgtctcccaccctctcccctgcagcagccagctggcacggggacctccccttccctctgggattgtgaatgagacgactttcctggtccttctgggtctagatctttctggcaacagtcagtgaaacccttgtctcaggtgggaggagaaggctcagtatgtggtcacaacaacggtcctaaccacatcactctcaaacgctggctttcacttaccccttgccctgcccaacagttactttcatcatcccattttccagattaggaaatcaaggcgcagagagcttcagccacttgcctgaggcccccacagttaagtgtctggatttgaaccctggagcagcctggctgctgagctgtcctggagacggggtactgtgcagtggtcggggtaggggtggagctctgccgtcgctgactcccgggctacctggagtgataacacagcccagtgtctgggcccctgcctgagactttggctggatgccaggagcccgagaccttccagctctttcctgtgtaaggcgccatggggtgaaatgaaagaaaaccccagttagaaggtgtccccctcttccttcagtccctcagctgccctggattttgaaataagacaccgcccgtctgtggggtgagcaggaacagattggaaccgcatttctctccccccagtcacagctgccaggagctcatctttctctgtctcctccccctgccgcctctccccacaagactgggctggatgctgctgggaaagtcaacaggaagtcttttggctgcggtggaggtgggggtctgtgcttccctggggaccgagatgagggctccaggttggctccggcaagagcagggaggctcacgtctctgcctgctggttttgcttcctgtcctgggagaaggtatccacatgtcccagaatgcaccctctgcgtgtacagggatggcttttgggccattcacctgaggtttattgatctttctctttggaactggagtggctcctccacggtggattgggctgagctctctgcctcggccgacgtctttccccaggcacttcctctcaccgtgccagggtgcaggttgctagtggatgggtcttcaccctcggggattggcagctgccacgctcatttcacagtcgagacaccctggccgaaggttctgctaagctccatggagtgtagggattttttttgagacggtctctctctgtcgcccaggctggagttcaatggcccaatgtcccgctcactgtgatctcgacctcctaggctcagcagtcctcccatctcagcctaccaagtagctgggactacaggtgtgtgccaccatgcctggttaattttttaattttaatttttttttgtagaaatggagtcttactatatttcccaggctgaactccaactcctgggcttaaatgatcctcctgccttggcctgccaaagtgctgggattccaggcatgagccattgtgctcagctggggttttcctttaacccttcctggcccttcccaggtgcaggacccgggcctcagccttatgtgttcttgaacagctctgggctctgtcctgtacctcctgggcgcgtggtcaggcctctcgtgacatcagcaggagactcaggtgaagaagcaggcagaacggaatgcttgctcacccagcctcggggccaggcggggcggccaggacagtagcagtggctggtgtggcttcctgggaggtcagcccattggcgtggccagcgaatggggaggggagcttctccccttgtctcccctcatttctggtctctgggcctccagggccaggtctccagagttctaggtggaggatggaggtcagggaagctggggtaagagcgggctgggggtgggtggtcaggcggatcctggaaaaccatcctctgcaggtcccgctttccccagggagcactcagggctggtcccggggagccgggctaatggtcacctcggatggtgcaggggtccatccccatgaaaccgggcccatccccatgaaactgggcccacagaagcttttggttccggttctgttctgccccctggctcttgcttccaaagtaggactcaggatagctctgaattccctgccgaaatgcagcttcctgggccctaacccagccctccagaaccagagtctctggggtgggccctctgcttgtctagcagcctccaggggacacttgtgcctgccagagcaagtctaataagcactgctgtaaacccctcgtccccacagccttctggttcgtctcccttttcctgctgggatctgcatcaggattaaatgccaacatcagggatcaggttatacttgtgaaccctgagacaatacctgcatctttttttttcttgaggctgtcttgctcgctctgtcatccaggctgaagtacaatggtgtgatatccactcatggcaacctccacctccagggttcaagcaattctcctgtctcagcctcctgagtagctgggactacaggctcacaccaccacacctggctaatttttgtatttttagtagagatggagtttcaccatgttggccaggctggtctcgaactcctggcctcaagcgatccgcccgcctcagcctcccaaagtgctgggactacaggcgtgagccactgcgcccggcctgatacctatatcttgaccaagctgctgtggaaacattgagttccccttgatagttttgtccacagagtgaatgtttaggaaccggcgaggcatctctcacccccacccagatggcggcctggaggcagcgtttctgaccctgtgatgggatttgtctctcttgtccaagagactttagagatgtggcccctgaatgtgggggcccctgttggggtgggaacgggagctggccctggccattgtccagtgaccccatctcagtgcctcgatcctagcaccctcgatctcagcgcctccccttccccggctccgcgcggagatcacgtggcttgcgctgagcaatcctccactgcccccgtcgcgttcctgctgcagggaagcctttccagggagccagctgacacatttggcctccattatttgtttttgaacaggaatgaaaggagagagtgagtaagaaagtggcaggaggtgggggttgcagagtaggggaaggtcagagagaggggaggaaagatctggaaagtccaggcatgtgctctggaagcaggtgccagcgatgagctcatctggagggtggccgcccgccctgagccctgcctggggccagcagggaacactctgccagggcatgtcgctgggagcctgtccttggctcactttctgctgctttgagcgctgagcagatttgtttccattttagggacaacgcaaggaggctgtcattccacccctcaccttattaatatttcatgaatcataagtgaccacttactgcgtcctgacgtactccaggcgctgggctcgaagctttatgcgcttcatgggatgtatctgcactatcgccgtagaaaacggttcctgttactactgcagagaaggcaccgaggcacagagaggttgaggaactggcctcaggccacacagctagaagcggctgaccctggctgtgaacacagggctgcttgactccaaagcctgagctggtttgcagcgaggctcatggtttctgtgccactgtttgagcctctggtcgagccccttggctcagtggggggcccagtgacctaccagctgttccattatatgttgtggacacctccacggcccacctgggtgggagggaaggggcttcaggaggtgggaggggtacagggaacacagtccagcctgcttgggcccaataccttgaccttcaaggtaccccttgagggtagcatgaggctaagctcttgttctcctccaggactctgttcctgtgagggcctcggggtcccttgcttttttctgggggccttgctggtcaggatcacagagaagctctttgctgttgatctttctgcctctgtatcttttggcaagccattttatgactcagttgctttgtctgtaaaatgggttgaataacattgtcctgcctcggagggtttttgggaggatcaaatgagacctgttgcacagaagccctttgtaagccatgctgactggcggtcgccgggcccccaagtgaatgggcatccgggcactgagtgtgtggactcagtactcggaaggaggggctggggggtacctagaactcctgggaggcttggacccctgctctgctcagattctgagcttctccttggccagtttaattcccatcagtagggtgagggtaaccaggacttacgcatagttgggcgaagtcgagtgaccacatgtggaagtctagcgtccttcatgcaaagtgggcaggcggccaaagtgagctctgctccagtccccccacccccggggctgttcctggcgccctgccctcccccagagccccactgacctgcaccatgtgacccgggcctgggaagatgggcccagctgtgggaggtcgtgcgggctggggactgagagtgccggaggagggcctcccaggaaaacccagctgcacaggaagccgggccagcggcctccggaagcctctgggctttgcaagctggactccccagatctgtggctgtggggccctctcctgcctgcagctgagagcccttgacccgcacctgagggcttcagaggtccgggagggggatgtgaccgtgtccccagggtgaagcccacccgagtgtcactctggatacagccctcacctcttcctggccccctctctggtcatggggacgctgcctggggggggttcccttacatggaaggagctgcagctgagctggcgggcctcgcacacccccaaggccgcctgacttccagcctccaagtggggttgcattcaccactcaggacctggagcctcagccagagagggaccctccactgcctctttctctgtctcttgggaaaggtagggtctttgtgccccctcccacccagggacctggcatgttgggaggctaagaggaagctgccccccgctcatctaccccccaaccctcccagccagcagagttttacctgtgtgcttagaatctgtgcgtggagccagaagtcacaaggttggcccagctgtgtctgaccctggttgtgcggtcttggacagtcccagccctcctggagctgagcatcctgatctgtagaggagaggctgctgtgccggccccgcagggccctgtgcagaggggagtgtgtgcggctgtgagttcaggccatgccctcagactggaggataggatcggaacagtgggtcaggatggccagagggtcccagcctcaggaggaggcctccacacctcccagcacctccacaccaggaaatgcagccaggcccccaggcctcccatgtcaggaagcagcaccccgccccccacctctggttgcctgggcctgagaagttgagcactcctcccgaatccgagtgccctctgacccctgcttgggtagttgtccctcctgaactgaccgcctgtcctacacagtcccctgtggtttgcccgacagggtggccagcgagtcccctgcacagcacacctcccccaggagtgctgcctgtgatgatggtgtaaagggtgcccccccgagcccccggaggcatgcagtggcgcaacagcgtgagcccaggagccccggtgagctcctggatggagaatctgttcagatcactccccagcctaaaccttccctgggtgtctgctgtgcttggggcgctgactcatcgtggggcggcctgtgagaccctacgtcacctggccactcccctcagcccctgttcactgcaccggtcccctggcctggctgctcctggaacatgagggctcatcctcacggaagaatattcacttgttccctcctggaaagtccctccctagacctcctggccgcctcattcaggtcttgctgaagcgctgccatcttggagaggcctccctgtcacccgcagttaaaacagccctcccatgcctgtgggtggctttctatggggcatggatgagtattggagagtcttgccgtttatttgttcatatgccctctgggagggcaggggacactgacttgtgttgtgggtgccttgcatgtcacgggtgctcagtgaatgcctgttaagcattaggggagcacaaaggagggaagcctctgtccaactggagcagtcagggaagacttcctggaggaagtggtatctggtctgcttagaatgtggcgatttgtctgtatgcagacattagattagagggcaaaggccattatcataacttagcagacagctacaagcagctaaggaattgctatgacatggactgctcgtgattggagctaagaaggagtcagagacagaggtccctgtgctctggcgtgagtccttgggggaggctgagctcccagaatgtggggccgcctgtgcagaggccggaggtgggagacacacctgtgagtgccggtgagtgtggggtgagccactggggctggatcagaagatgggaatccctaaacccaccaaccagccttggtgccctgggagtgacaggagacggggcttctgggggactaacccagcacaagtggacgagatgggatgcaggggaaaggacaaagctctctgaggctttgggaagctgagttagggtagagccatgacagggtgagttccagaagcaacacaagaaaaaatagctagactgggttttcccttcactgtgggagatgccccacctcacttcccccgtcctccgggctctggcaatgggctgggcacagtgaatgggttccatctgcaggagtggtcacaccccttgggcacagctgcctcatacactgtattgagatgggatccgaggccgggaagaacagcttcttctgtaggttgacattgtcagccttcggggagggaaggacggcagggggcctggagcatctccttttgccatccacactctgtgcctgcctgcagggtcttgagccctgtctgttctgcctcagtcctggtcaggaacttgttggagcccataggggcagtcaggctggaacaggaggagaccaggccggcaggggagccgagagggggccctggacagcacccagggctgagtcatcctgggcctgcccgacttgctatttggagctgttcccgcttgctcatcatgtgcaaggtcctgatccactcgggtctgtttaaccagcgcccctccccaggcccagttagcctggttttcgttcgattcatttattgtcatcagtgccatccttgcaccacgtaactagcctttgcagcatgccagccaccaagctcagggccctctgtgcatctcctgtaaccctcacagcaacccgggaggcacagagaggctgagtcgctggcccatagtcacacagcaggtatggggcattgccaggatttagccggatctctgactccagggcctttccagggccttgggtgggacactggcaaggaagcaaggtatgaacactggccctgccttggacagagctcggggacggtggcctggcaggcccagctgacacagtgaccctggtgcaggttcaaccattggcaaagtgttcaagtacacacagaatctcaactggggagacaggcgaagcggtcaagggagggctgtgagtgacaggtggacactgtacctactggcagatcagctgaccttggtgccttctggagcctttcaacttccttatccagaaaaagaggaactaacagttccacccccaaactgggtgggagtaccacattcgaaattgaagcaaagctggtcgtgtcacaggctcggcagatgttagctgtgcaggcaacttagtgaccatttgaagtaggctgtgcggcggcatcctcatcttgcagatgtagtccagagaggttagggcactaaccctgggtcacacagcgacagctcaggctacagagagcagtgctggatgggagggtgttggcagcttcaggcacaggctgggagggctgtggggtcagcagagggagggcacacttcccagctggtggggttcccttgtgcctcagtactcatgtgggcccaaaggagctggaaggagggaggttagagccacccatgggttcagaagctgataagcaggttattgactctgaatttgcctcatcgtatgtaaattggggacaaatttggggatttaatgatataatgtaagaagcagacatgtcacagccctggttatacagtcagtgtataataagtggtaagccgtcagaggaggcagccggtgagaatgggagcatctcagcagccctccgccccctgctcctggttgcagatgtacctgttcttggctatttgtgccccagctccgtgtcctccggtgtgtgtgaggccaagctcctggggtggggacttgggggtgtgtctgcagctcctgaggccaagaccaaggctgaggccgaggctgaggctgaggccaccttggtgaggaggaaattgcaggtggagaagctcgttgaccgtgaccttgatctgaccgtaattttgatggtgccgatgccgtcagcacgcaggcctcctgccctcgccacgactggctcctgcagcccacctggctgagaggtgtgctggctctcgcaggttgcaaaatggggacatcaccgtccgcctgggctacagcgtgctcgccgattgcatttggggagggactgagggctgattgtgttgtggggatgttggcagagaatcagagagggcatccaaaaaggccaacagttcggtggggagaggaggcgcaaggctggttcctgttttctgggctttgatcgaaagggaacaggggacacatctggggacagtctccttcctggaggaagaagggcttagggtgctggtgtggagtttgcacagatggggataatgagctggagggtgctgggcaggagctggccagtaataggctgacgagggaggccctgctggctgggcctggttttcaagtgagcatcctgagctgcggggacccagggggtcttagagacctcagagctgagactcgggaccacagaggggtgggctgtgctcagggcaacacagcggatggggcagatgttgcgaaacctgtctctctgcctctctttctcctgctacagaactggatcctcccagctcatggctgtcaaatcctttagatgcttctgggttccatgggcgccttacactggcttccctgtaggacagcagaccctgggggttggctctgatggtattcaccatggggtaccccatgcaagcacagtgctttcacgcccagcctcccagcctgtggagtaggcctgtgtctggccagcctcactttgtggccagaggagggagacagtggttctggagacaggagctggcctggggctgccctcccagcccctgttctcccagctcatctccttgccttgcgggtgctggccaccctccccccgccagctccatccccagctttctctgcccgagccgtgacctgtcagtagggggcagtggaggccttgaaagtccttggagaggactttgaagcagtttttacaaatctgtccctggaaagtctctcctgtcacacccccagcggctccctccctcctaacatttttcctggggttgtcatgcagcggggggtggaggaacccactaggccgtggatagagcagagccatgttgacacaaaccctggctgaacccacatgctccctacagccagcggccgatcactggaaccagggaagtgacctcatagcaagggcccgcagagcagccatcacgcattcccgatcttggtttctggacccagctctggaaaagaagccagatcctagccacttggagctgcctagggaagaccccagcctggtgccggctgacagctcactggaacttttcatctgcttggccaggtgatgccaaggggcagaggttagaagtgctaagaagcaggccgagggtggtggctcacgcatgtaatcccaacactttgggaggccaaggcgggtgaatcccttaaggtcaggagttcaagaccaggctggtcaacatggcgaaaccccatctctactgaaaatacaaaaattagccaggtatggtggtgcacgcttgtaatcccagctactctggaggctgaggcaggagaatctcttgaacccgggaggcagaggttgcagtgagccgagactgtgctactgcactccagcctgggcaacagagcaatactccgtatcaaaaaaaaaaaaaagaagaagaacaagaagtgctaagaagcatctgtcttcctgattgaaaagcaatctttgctgggcgtggtggctcacgcctgtaatcccagctttgggaggctgcggtgggagagtcgcttgaggccaggcgttcgagaccagtctgggcaacagaggtgctaggggtagtggcgcttgcctgtagtcccagctcctcaggaggctcaggtaggaggattgcttgagttaggagtttgaggctgcagtgagctatgaccacaccactgtactccagctcctgggtgacaggatgagaccctgtctcaaaaaacaaaacacaaacaaaaaaccaacgtttatcttttgtgattttaaaaatcacacctacttgtgacaaaataattaaattagaaaatgtaaaggaaatgatcaataataattgcgtcctccagacaaacactgttaacatgttcacgtttccttctagtctttttctacatagacactcaatacttattaatttgttttgaactaaagatggttttctctgctttgtatgagaaccacctcagccaggcacggtggttcacgtctataatcccagaaagctgaggcaggcagattgcttgagcccacgagtttgagaccagcctgggcaacatggcgaaactccatctctacaaaaaaacacaaaaattagcctggtgtggtggcacatgcctgtgctcccagctcctcaggaggctgaggcaggagaatagcttgagcccgggaggtagaggttgcagtgagccaagatcgtgccactgcattccagcctaggcaacgggagtgaaatgctgtctcaaaaaaaaaaaaaaaaaaaaaaaagttgccacgttgtcacctctctcagggattttcatcctttctacttttcgcccaagacttgccctgtaaaaggatgaggccaaatagccatgggagggtggtactggatgttcaaaaaaatgtttcgtggctggcgggacttagaaacaggttggggaggtttcagcagagggtggaccccagctgggggtggggggcagcaggggggcccctcacatgctctctctgcgtgtttcatggggctgcctgtgaggccgtgtgaaccagagcccggctgggaagccacatgctacctggactctgacctttcctggcagcatgaccttagccaatacgctcaactatgttcccctctgtaaaatgggctaatagaaatgtccactcgagacatgatgagaaacaaaggtgttcatagagcaaagtgcttagaacggtcctggcatgacaggagcccacatgtcagtgctgccgttggcatcgtcatcatcacggcggcattggctgctttgtttctcccttgtccctgtcaccttcttccctcagcaggctctcattcacttgttcatttattcatggccgaggccccgtctgtgtcaggcctggtgctgagaacgggggtagagagatgggggctgtgccctgctccctgacccaagggttccctttgcaatgtgaagttcttggagactggaccctcaggctgttccaccagcccctcctcaggccagcttaacccttccgtgctcgttttctgagctgttagaggaagagagcgggaggaaggatggagtggggtttttgtggggactgagcggggggtgtgtgaggccctggaaatggtgcctgcggcactcacgcagcattagcttttgctgcagttgctgtttggagaatattcttggatttcaggacactgatgacagaaggtggaacgctttttctggaagccatcaagaggggaccaccgcggcggctgagcagagttgctgacttgtgagctgtggcctgaccacagtcactgttctcatgagcgaggccccctgtggtccccctcccaggaatttctggccccttggcaggggacagttcagggctgggggtgggtagtggtgtctgcaggccctcttggagtcagagaatcccctgtcgccgtggcggggctgttccctcctgcccctcccctcccgctgtgctctcagctgctccgacaggatgcttttggcctgagagacagaaaccccaactctgaatggcttcagccctcaagagaatttggagcttttttgtgcaaaatgagatgttctgagcatcgaggatgctgtgggggatcctccatcccaccatctccagccgtggtgtccctctcggtcacaggatgctgcagccacgttgcagggaaggagagcctcccttcctgtgagcctagggagcccctccatgcagccccttcactggccattgcctgagacccgacctggtggctcctgccccaaggagcagaaagggggttcgctaggtcagggtggggctgggtgcgaggaccccccccggccaacagggtctgcttaggtgtccgtcctgttggggcagcagggaagggacccacatgtggcactgggacacggagaggcttttgtgcctgtgacggccaaaagggatggcgccccagccacgttcccacccaccccgaggcccagcatggccatgccggaaatagcagcatcgtccccctcactgtcctggcttgctttcaataggccagaggggtggggctggagcgggcgtctgacctgtggctggatctagctgcccgtggacaggctgtgagtgaatctgcagaggaagggagatgggaatgccgggaccttctcctgcacctcccgaacccccgttccctgtgagttagatggggagtgcacccctgccctcccctcctgggtatcccctgcgccccccgccccaggcacttgatgttgcctgttcattttccctctctgcccctcccgctggcccttcccatatggtcctaattaggaccttccgcccgttggtggatgggcagagaggggagcttgctgtggggcctcccccgatcgggggacttcccagcacagagctttctggcctctgcagggacgctgtgtgtgcctgtgtgagtctggcgtgttagaagcgctaagctgcagctgttctgtgcgtttttcacatttctcacttctcaaaggccctgggtttggtgtctgtgggctggggatctgtgttggggtctccaggaggcccttggtgggagaggcagggccccttcccctttaatctgggcaaccttgctttggcctgctgtctgcggaaagtgccctaggatacggtggcaggactggctggggttctggctccaggcccagccccagcccctgtcagacttaccctccttgtgcctccgttcaccctgtccacccgcagggcctgcaggagcatcctgagagttggtagggtggcctgcccggcgtccgcacagggtctgctggtgggtggctgaggctgcggtgaggtctccatggctccctcgtcctgcacatccttcccttgttgtgttgtctcgctagcatatgagcccgtactgcctctgagtctgcagcctgttttccttaccaggtggctaagcagggtggcagccagggtggcagagtcccattggcctgcaggggaccctctgtgggctgcaggtagtcccctgtggttgaaggtgccctggcaggacctgcaccatgacccccgtcaaagctcacgtccaaggcatttgtgggcacccccgccccagacgtgagggttggcatcttctcttgcacgtgaagcaaaggcctgtttgaaggagcgtgtggaagcctgggtgtgatgaaggcaaggaccggtggctcacccctcttgcacctggaccttgggtggcaggcctggggccttcagtccttaattcaggagggtagccagtcgctggaactaagagtgaacttcagctgttgttgccatagctggagggaagaggggaaaggaggcgctgcaggggagcagagacctcacccttcctctgccgacatcaggctgccggtgctggacggggccctggcaaccgtggcaggagtggtgatgtccgatgatggtaacaagggcttcctgaggaccccgagctgtcttaagggctctttacctggagtaagtatcccctttaatcctcccaacaacactgtgaaattgattctgttgttattcccatttcaccgatgaggaacccacagcccagagatgttaagtaacctgcccaagcctccctctgagcatggcagagggagggtccgaatgcggaaagtctggcttcagtgcccccatccctaaccactgtcatttacctcttcggccagccctctgattgcaaaacctgaggcccagaggagtgcagtgacttggccagcttcgcacggcaggttagtggcagagctgagcagtgtctcccatgccctgattctgtggcttcttgaggtggctcacccctaaacacgccccccatggtggctctgtttcctcctctcctctgaacctgccagcctgtgctcaggcagggggagaagtagagcaaccatgccgggcgggtcgtcgtgccccagtgccgcctgccctacacctgattggcagcagagtggcccctccttggtgtggtctggaggtgccagtggtcactcatcagcacagcccagtctcacacatgtcactcccaaaggatgttgacacagaatgaagcagctaggggaggcggacgctttggcacgagggtggcgtttctggtaatccgtagtgctgttgtctgtggctgcctttggctggcatctcacctcctcctggctgtcctgcagccacctgagggaggtcagcatgtcgccttcatcccaggacagtgtgaatgcagcagcgcaagcttgccagcgccgcactgcgggatctggaggcctttgctcctgagccctgcctctgtgtaatccctaaagcacggacttcttaggggcttccattcctccacctggaaaaaccttacaccgtttagggcttgaggcagggctagagcatggagacgttgctggaggaccaagggagaactgagcgcgtgttctcttggcctcagcctcgtgtgtgtgtttatgcatgggtactttgccatccacactggcttccacggctgggtgggagttgagttgagctcggcggctgcctttccaccctgcgggcctggttggggagtgtgaggatgcctgctggaagccaacgtgcacgaaagagttaatggtggatcccatttcctcagccccctctccagctttcccagggaaagggcaggaacagagaggccttatcttcagaggaaggggtgggcggggacacagcgctgttcggcacagtcccctctgagccaccctgcatgtttcattccaccgacttctgcagcccagctgttcagagcggatccagaaggtggagagagggtttccaataagcagaggatggagtgaatgtgagattcattactgggatttggcaaagcaaagagcctcactttctccccgcagatgggacgggggcggggctggagccagcggggtgggggtatccagcaagagctccttcccatcctcccacttcctttgccatgggccccctcctccacgcagaccctcagcctggaatgatcagtgtccagcttttctcgcccctctcctgccccgctggagggagtgacctggcccctggccccggccacctacacctcctgttttgctgcactagcctcgtggtaggggctgcggcggaggtgggcaaaagccgcttccgggcagccagcccccatcctgggagtgactgaaagtccttgggggttcctgcagggtgagctgcccattctggccctggtaaggacacccaggagagggccagggtgcctgtatttggggcacagcataaagaacagccgtaagtgtttctcaggcaggagggtgccgaagcattgggaagctgggatttagaagcattgtttggggtggtgagtggaagatgcaggacacagattcacgcgattgtgcagatcacctggcctcactccctcggtttacagtggaggaaactagaggccgagagaggtgaagtgagttccctggggtcacacagcctagccaggcccagggcgccgacctcctgctctgccttcccgtgcccattcggttggcatcagcatccctgccttgacacccccgtgtggcagctgctgtgattctgtgactcctcctcaccccaccccagtggggccctgcgagggaaagaagaatgccctatgcagaagtggttggaaagcaagaagcctggagagaagtgaggcctctgtggtttggcctgagtccaggactcatggcctggttcccagggatggagcaccgacccctcccttctacacccccaccccacgcccccaggagctccctatggggaagccggaatggacctgggctcagagattgtaaattcatcttgctggatgtgtggctgcctttatgtaaccaactctctcacggagaagccaggggatggctctcagtactctcgggggtctctcagtgaggtgggaggacctcgagaggtcaggaggctgctcaagaccttctgcccctcagggaccaggtgagggcttgtcgactgctctgacctcctgatgcttctggtggggagacctcagaggggcctgccgtcaccatcgccagtggccctggcctgcccagtcatccttctggggtggccaaactccatgctgcaaaagcccaagtgaaccccagtagtggcctgggagaatcatctgtcacgagccaaggatggagtttctggggaggactttctgctgccccccaacccctttcgggtacattctcctgtagccccactccctgtaagaaagtcaggtgcctcccgaagcttctccctggccccaggccagaggtgacagtgggggccccttgcttgcgctggtgactgtggctggttgttggtgcctggccctgccctgcactgtgcacccattgaaggcggcatcatccgggcctctccggtggccatgcatgggtgagcagcccacgacacatctgcttccagcatcgtgtgggccggggctttcagaggggctgagggcttggatggccctgcaggggggtgctcctggccttgtgaccgaaaggagctgaaggtttggagaagccgttgggccgaggtcagttcttatagatttggcgaggagggaacagatgctcacggagctgctccaggcactgcacacactgcctcactctgcgctgacagccaagaggctggttccccgccgacccccattttacagataatgtgctcccccagttccttagtggtggagccaggattcgaacccacgcaggcagcctcctgggcctgtagtcctacccttcatctccctccaggacctatgtcttggggttggcaggataatgactcccagagttgagcacatcctaatccccagcacctgggactacgttaggtgacatggcagggccagctaaggtcactaatcagctggtcttaaaatagggagatgatcctggatgatccacacgggcccgctgtcatcacaagagtttttaaaagcgcaatagaccatctgaggggtgcagtgggagaggcttggaaggaggaaggaggccacaagccaagaaatgcaggtgaacagaaaatgcaggaaaacgcagtctcccctgcagcctcgggagggtgcgcagccctgtggacaccttccctgtagcctagtgaggtggagtgtgggactaatctgtgttgtttgacatcacaagtgtgtggtcatttgctacagcagtgatgggaattgaatgccattaggcagcagtgcttctatcccggaagaattaggataaattcccctgtggatctcaagctctgggagattctgggctcctctggactgctccagttctgcaatcataggaaaggtctcccatgtctgtttgggagaagaaaaccccgtagcaaatccatttccccttttgacaaatgaaggcgagggtgtgggctggacacatgtttcctttttgtggattttttttgttttaacacttagaattctgtagctgaaggagactttggggggttgtctgcctgatttgcaagtgaagaaatggaggcccagggaagttaagtgactggcccagggtcatgcagagtcatgctggaatatcaagctagatagcccagttcctgctccaaagtgctttcctccctggttggggaggagggttggagggagtggaccccgagcaacagcagcattggcaggggttggaagagtagctactgtatccaggtgctggagcctctggccacttcctgcaggaaccaggtgacccaccatggcacaggcctctccctgtctatctgcagccctgggggccccagggaccagaggacactctggcctgagggctggggcctgagagaagagatggaagtacccctagtctggcctgcccccgtggcgtcctgcaggcatatccggcagcccaggggtcctagagaacttggctggtgggcgtccccaccttgccgcagctgcaccctgtggccagcagcttgcaggacttgggctgttgcctgtggccctgaaacagtcattttctgagctgagtggggatcaggtgagcagatccccacaccttaactgctgtgatctttctgtcctggaggctggtgggcagcctggttggtgcttcatggcactttatgaccggccctgtcaccaggctcgtgagttgctcccctcctttcgggcatcctgaacggcttccctgagagccccgccctgggccttcgcctctgcaggcccccgctgcctggggcgcctccttcccctggaagctgggcctctttggggactcattaagaagggccttgccgagtgctgccaaattgccccatctggtccccatttgttccacttaccaccctattttaacttttatgtctcctccttggctctaagatctgagcaggcagggcctgtgaggcaccccaggtcccctgatgctgccagcacccaggggactgttagtacatatgcagggagggaaggaatgaaggaagagatgacttggggagtcctccagttcccatttgtaactggcacattgcgacaaaacactcatggcattttacctttttcatataccttttttttaaatttatttttatttgagatggagtctcgctccgtcacctaggctggagtgcagtagcacaatcttggctcactgcaacctccacctctcgggttcaagcgagtctcctgcctcagcctcctaagtagctgggattataggcgcccaccaccacgcccggcgaatttttgtatttttagtagagatggggtttcaccaagttggccaggctggtctcgaactcccgacttcaggtgatccgcctgccttcgcctcccaaagtgttgggattacaggcgtgagccactgcacctggctttcgtatatctataaaagagaatttgcccagaaaatctttcagatgcacctttagggttttaaggcacagatacatgaagcttgtcagtgagcagctgctgcttattcctttttctcttccaattcagagcggcctgcgtcccaagcggacagctgctcccttcctcttggctccctgctgcccacgctcccacagaagcagggagaagaggcaggaaggtgacgcgtgatcatccgctgggcgcccgcacagtgccgtctgcacaggtgccatctcctttacttgtcactctcctcgctgagccctttcccctttttgcagatgagagagcattgcctcccagaggttaagaaatgggcccagagtcactcagctgatcagcgtgcagccagatttgaaccacatcctgctgatctccatgcctgcaggcctggcctgatgagatggacagctgggtggtggagaccttgagaccctggatggctcccaaatagggcctgtagctcctggacagggagagtctggcacaaagggtttgtggagtgagctgggggagaaggtggcttagggtccctgtctctgaacaaacagatggaggggctattccagcgttttctcagcctctggtgtgctgggctcctggttctgggaggagagaatggagctggcctccattctgggctgggctggtttgggcccaattcagacaagcttcttagtttgccatgagtgacacttttgcctgccctggtgtctctgccaaaaatatgaagggtttcagaacccccaccccggcctgcttccctcccagacttggagtgggtctggggctgacaacagtctcatgccagatagcctgagcagccaccagtgccatcaggtctgacactgcggcccctgccccggagggaaaaacaaggccctctctgggggattttctgccagcttgtgaaaacaggcctggagtcagccagcgcccccatgcttagacacttcgtgtggttttcaaagtgcttttatgttgctagctcatatgatcttccccaaaaccccataagggagggcaggaagtttgagcaacagcctgtcaagcacccatacagcaggtggtttcattgccctccatttacagacaagtaaactgagcttcagggtggctaccgcttgtctcccaagccacccagccatttagccacggaagaggtcatgactttttacaccccagtgaagctgaagatttttctttccgtttttaaaaatgtttactccccagggcagtgaacacctggtgcctctgtctagcgcaagaggtgaacgtttgccacttccgtttctttcctcctaccagacctgaccctccttttgtgacgggaacatcctgcaggcagtctgtcctgctttcatagactttgagaaacggggtccaaattgccggctgtgggtgggacaggcgacactgcagtgaagaggtggagtatttttgtagcggggaagaaatacatttcctctaccctcttaggttcagtgtttgggggtctgtgaattaaactcactcaagataaattaatgagagaaaagacagatttaatcacatacgtatgggatttcactgaaaaacgtgactcaaaagagcaggtagaaggtggggcccgtgactggtccgaaggtagtgagttatctcagttgattgttcacagtcagttacagattagactccttgttccactgtctcccctcttcccacttgttttgttttttttgagtcagagtcttgcactgttgcctgggctggagtgcaatggcacgatctcggctcactctaacctccgcctcccgggttcaagcgattcccctgcctcagcctcccgagtagctaggattacaggcacccaccaccacgcctggctaattttttgtatttttagtagagacagggtttcactatgttggccaggctggtctcaaactcctgacctcgtgatctgcctacctcggcctcccaaagtggtgggattacaggcatgagccactgcacccagccaactagtcttaaaaaaaaaaaaaaaaaaaaaagaacttagggcccgtatactatcttaataggaaaaaaggaaggggtgaaagcacatattatgggccgggtgcgatggctcacgcctgtaatcccggcacttcgggaggccgaggcaggtggatcacctgaggtcgggaattcaagaccagcctggccaacatggtgaaaccccgtctctactaaaaatacaaaaattagccgggtatggtggtgcacacctgtaatcccagctacttgggaagctgaggcaggagaattgcttgaacccacgaggcggaggttgcagtgagctgagatcataccattgcattccagtctgggcaacagagtgagactgtgtcttaaaaaaacaaataaaaaaaaaaaagcacatattatggcaaaacaaatgagtttttggaaagataaataggcccttaggagctgagatgggagatgtgaagtcttgtgacaatgtcttcttaggtgtggtgtggaaactactcacatcttccagggaagagtcagttgctcccagggagcagatttgggcctgtataccatcttaataggggaaatggaaggggcaaaagcacatattatgggctgggtgcaatgtgcccagtgcaggaggcagacgtggtttatggttgctgttgaaaccagtgcagggcccgattgctttgtattgagtgttgaggatcctggttttgtatcagccatgagtttgcagctctgggacacacttgatgttggctcaaggggaaatgaggttggaggggcagggtggttggattggatgtgggcctggggccattgctgatctacaaagtggtcatcacacgggaataatagagctggctacagaccacaaccagcaatattatttaaaagtaaggtcacacttttaataataagtcacattttaagttattatcaatttataaaacacactgttggtataatgatagcttttcaagaaggatataaaaaggcatgttgggctgggtgcagtgactcacgcctataatcccagcactttgagaggctgaggtcggcggatcacttcaagccaggagtttgagaccagcctggccaacatggtgaaaccctgtctctgctaaaaatacaaaaaaaaattagcttggcgtggcggcgcatgcttgtaatcccagctacgggggaggctgtggcagaagaatcacttaaaacctgggaggtggaggttgcagtgagctgagatcgcgccactacactccagcctgggcaacagagccagactccgtctcaaaaaaaaagaaaaaaaagaaaaaaagtaaaaaggcatgttgaaggtacctgcttgtggaaagttgcaacttgacgggaggtagggcgagcacttcttagaaaggtggaaatgggccctcctgctacagagacccacaaacatagactgaggcctgcagcctaggagactcaaaagaggcaaaggtgaataagagtcaaggtctccaagtcagggtctgactctgggggtgggggtcacatatgatggaggatgtcaggagggcttcctggaggtggtgacatttaccaggggggattttaggtggggtttgcgagacagtaggacctggctgaagagcgtaggctccttagacaggagtgggaattcaggcttgaaaatgagttggccagattgcaggggtcctcgaatgcaagggaagaatttcaactttaacagaggagcctgggaagctgtttgggaaaaggagtgataaagcgggaggggtcctccagcagagccctgcatgggcaggagggagcgagatgggaggtgggtgttggtaagggatgatcccagtggtccaggggagcagtcatagggtggaaactaaccttgtggggtctgggcaggaagggactgatttgagacaccgggaagaaacagccagtaggactttggtgagagggctgggggtcggggaggggggtgtggagagtgggagcttgagtctctgaaaacagacagtgttccaagggggagacctgaggcaagatgtggagaggcagctgagctgggaagctggaacggaggtgtggtcactccaggagactaagtcagggggcgaggggacccttgggagctatctagaccccagcactagggaatacggaggggagaaggaggggagaagaaccagctggtgcgtgtcaggcactgccctcgaggtcagatggggtggggctggatactggccatgaggattttttcaagagctgggttaatagtgagacgggcggacaccagatggctcgggctaagaagtaagtgggcggtgggaagctagaagccgtggtgtagacctactttgagaggttgggctgttcagacagggagaaagttcacagtttgaggaggtagataggtcaaaggaagagggtttgcttgtttttgagattggggcatcctgaacgttctcccaggccaagtgagaagaaaccagaagaggaacatgtcacccaaatgtgctgaaacagcccagcagctgcgctgcctcacagaaaatgtgcagaggcccctctgtcccaccatgcctgcctggggacggccttcactcgggctactcagggtttccccagcctgccaacccaagggtggcaggagctgtgggtgctcccagccccttctcaaggttggtctgtgggtagaaatgtgggctgcctcggggcgtcacagctacaaatgcataccagccctcagaaccacattcctgctccccagccctttcctccgcacccccatgcagaagcgcggccgccagctcacaaaggatagggagggatattgctcttggcatttgatgggaagcatctgctgcatcccattggggtgttgcccaggatggattggaaaagagttggcaggaaggctgagctctgtgctcacaacctggcttggtggtggccgaggagcttggcaggagcagagtgcaggacctgggaactgggggttggtgcatgtgtgcacgcacgtgtgtgtgtgtgtgcgtgcgtgctgggtgggtagggaggaagctgtgaaaccacatcccctcctctctgctgctgtgttgctgtgtgtttcagcagcacgtgggtgtcaccacacttcctagcaggtgtcaacctccaagactgttctgggctcttctcccagttggctgagttggaggtgggagtcccaactgtcccctgtggcttccagagtgggaccttgctgtgggataggctggccaatggtgctccctcccctgtgacccttctgttgggtgggtcacgaggaaggactgtgggtgttgcccacagacaggtggacatgtggcaaggacaccttgggaccttctttctgacgccccttgaagggggcactttctcagctttgagatgagtctctgtggatgtgggaagttcactatctcaagagcagcagccttggaaaatccaacacagaaccccgagtaggggcgggaaggggtcctgtcccgctcactggctgcctggcagagttctgcacaaggaagcgcctgtgttgctgtgggcggaggaatggactgagggctacattcgcttcctgttgccgctgtaactgcttatcacaaactcagtggcttaaagcaacagaggctccttcctttacagtgctaagggtcagaagccgatcagtctcaccggactaaagtcaaggtgttggcagaatccattcctgcctcttccagctttgggtgggaggctctgctggagttccttggcttgcggctgcatccctccagcctctgcctccatcctcctacagcctcctccttctctgcagtcagatctccctctgccttcctcttttttttttttgagacggagtcacccaggctggagtgcagtggcacaatcttggctcactgcagcctccgcctcctgggttcaagcgattctcctgcctcagcttcccgagtagctgggattacaggcatgtgctactacacctggctaatttttgtatttttagtagagacagggttttgccatgttggccaggctggtcttgaactcctgacctcaggtgatctgcctgcctcagcctcccaaagtgctgggattgcagccatgagccatcacacctggcctgcctccctcttaaaggacgcttgtgatttggggcccacctgggtaatctcttcatctcaacatcttcagttacatctacagagtccctgttgccacatgaggtaacacagtttgggaagggagagttattcagcctaccctaggggcctgtggtgtatctcagggcccttctgattttaagatataaagcaagaaaacaaactggctcaaggggaaaaaaggacacgttgaattctgttgctttaaatgtatatttttttattgtgctaaaatgcacagaacataaaatttgccattagtaacactgagtacattcacagtgtcgtgcaaccatcagcactgtctagcgccagaactttttcatcaccccaaagggaaaccccgtatccatgaaggactcactccccattcgccctctccagcccttggcagccaccagaatgctttctgtctccataaattcatttttaataagtgcaattctgtgtgactttaaaataaataaacatgagcacgatgagttgcttattggaaggatatccatgcggggaggccggcgtgtggagtgcgtaggcctccggacgggcaggagttgaaggggcgtggatgtgccgccctctcctccccttgctctttccttggggtcactgcctgagtatccctctttgcaaatggccccaaataatgtctcagcccccacgtctgcatcgcctcctagcttcaggaccctccaccaaaaaacattccaagcttcagactcactcctgggaaaattccaatggcctcactctcccttttgagccagccagatcccatggcctgtggcgggctgcctttgagtcctgagcacctgtgagctagggaagcaggacaggcacacccagggaaggggaagagtcgtcgtcagtcacagtaattgatatctttggaatcgtctaagagatacttagcgtgtgcctaaaacattcatttctttttttgtttgttttttgagacgaagtctcgctctgtcgcccaggctggagtgcagtggcgtgatctcagctcaccgcaacctcctcctcccgggttcaagcgattctcctgcctcaacctcctgagtggctgggactacaggcacacactaccacgcctggcgaatttttgtatttttagtagtgactgggtttcaccatgttggtcaggctggtcttgaactcctgacctcaggcaatgtgctcgccttggcctcccaaagtgctgggatgacaggtgtgagccaacacacctggccacattcatttcttaggagaagctctgcattttctgaaagtgaaatgtccccaggcgggtgacactgatggtgggatctgtggcctcaccagtgtcttatgagagatgccgctgtgtgtttcaccaagctgtatcctattgtcctctaaatgtggcttgtagacatggtgccgagaatgatctgggaggttcaaatcataatatggtccaaatcaacagctctctgatgacctggtattatcctaggatcaaattgagactatccgaggatgggcgtggtggctcacgcgtgtaatctcagcacttcaggaggctgaggcgggcggatcaattgaggtctgtagtttgagaccagcctggccaacatggtgaaaccccatctctactaaaaatacaaaaagtagccgccggacatggtggtgtacgcctgtagtcccagctacttgggaggctgaggcgggagaattgcttgaactcaggagacggaggttgcagtgagccaagatcacgccattgcgctccagcctgggtgacagagcaagactctgttccccggcaaccaaaaaaaaaaaaaaaaattgagactctccgagctgcactgtccagcatgatagccactggctgcacggggccatttgaacacctgaaatgtggtgattccaagtggagaggtgccgtgtgtgtgaagtgcactctgggtttcagagtcctagcaagggggaaagaaaagaatatcaaatatctgtcatttttacattgattacatgttgaattgataatattttgggctctgttaagtgaatgatattaaaattaatatcacctgttcttacattttttaatgatttcctttttcttttcttttctttttttttttaaatatggggtctcacactgttgcccaggctggagtgcagtggcacgatctcggctcactgcaacctttgcctcccaggtttgagcgattctcctgcctcagcctcccaagtagctgggattacaggtggctgctaccatgcctggctaatttttgtatttttagtagagacagggttttgccatgttggccaggctggttttgaactcctgacctcaggtgatctgcccacctcagcctcccaaagtgctggtatgacaggcgtgagccactgtgcctggcttgttcttacattttttattgtaggtgctggaaaatgtaaggttgcgtctgtggcccatgtgccgtttctgctggagggttggaccgagggccagccgagaaggctctggggctgctctacctgaatgctgagtgtgtgctgagcggtagagaactttgagaagtgctgaaggacagaggctttgtgtgggggatgcagccccaggccggagatgccttctctgtgctctggagaccctcatttggtgacagcaagaggaaccactgcaagaggggcggccacctcagcaaagcacccaggatgctggcctcccagctcaggaatccagaggcagaggaggggaggaggctgggcttggaggagagcagggtcttgggccctgggaaaagcctggggggccagaaagctgggggacagattgaggccagaggcaaagagaagaaggttcggagaggagggccaaggaagaagggttctgcccacggggagggagaggcccacggggcaggggcgtggtgggagctgcatcctcgaggctttctgttgaccctgacacctggccagaaaggagttccttctggcatcctttgtcagcggtttctggagctgccctttaggggccagtgatgagggtgccctgggctgggctgcagacagtggaaaagacaggctcttctcactcccagtgctggggaaattagcttcttggaggaagggggagctgtattttctgagtggccgcacttcctggcctagacgtgtgtgtcttgctgtaattttggcgactggtgttggtggtgcccattttatggatggggaaggtcaaattccacagatattgagtgacaggcccagggccttggatttcagtgtttgactcagaacccaggtctctgatctgccaccagcctccctcccattcagatgggaacagggactccgggcatgcagtcttctcccagacactcccccggctctggcctggcgcccggagaccagtagcagcagctccccacggccgttcactgtgagggtggggagggccgtgggaccaggaggccttagggggaaagttggccatgaggagtgggaagcgacgggtcagatgccagtgactgctggctggggagccgctggacgtggctggcctgtttggccagtgtggcgggtgccccggggcttcagtcacccccagccacgtgtgggggtgcgggatgggaaaggtaagagtgtgtggagcccagtcagcactcaacatgaggtcccgtgggggctgcctgagggcgtagcttccagaattcagcccctggccctcagaaggtgtcaccaaaggcttctttccatttgagtgaatccctcccagcccccagcaagccctcggaacgagcccactcccaggcgctctctcctagtgtgggagtggccacgcccctgctgggagtgactcacttgggttcagaggtcgtggcactgagatgggtctggcagatcccagcgtccaggcccagcccctatagtgtcagctccctcctctggggacccccttgcttgtgcccctctgggtcccagcacatcccaggcctgcagggagggggagaggaagagactgactcactggccaggtcccccaggggctggagaggctggagaggcaggagctggatcagatctgaatccagaggctctcggaggaagagctcagggtgagctgcgcccccatcccctgcccctcctctcctgctccttctcccttccatggtcccagccagcaagcacctggggtagaggggacaaacccaggtggctgtgttccagccctggctgcaggtctgaatggctttctggggtggctggccatgctccctgagagcccagctgtggcgatgtctgagcaggtaggtgggggagcacctaggaagcaggggtgtcaggcagagcacaaggagagagggtgtccaggtcagtttcaggacctggctgagaggagggggctcctcacgggcaccgcctctggcaagcacagggacaagggcaaggacggcatggccagaggtccctgggagcctcttcccctctcttcttcctagcagctccccctcactcttcccagggaccctgtcactttcctttagcgtgtggcagctccttggcgtccctcccgtgccttcaggttgcttctgcgccgggcctgccgctgggcgcccctatctctgcctgccccctcctcctgctcccctcgccctgcccccttggagcaattccccaccgagcctcccttcccaggcagtcgaggtccctccctacctctgccccgcgctctgggaggctccttgttccgcgaccacaaagcccctttgatcctctgctcggctctgagccatgtgacccggtgggcgggccgcggctctcggcgcgtccagcgcagcccgacgttccgctgctggggtgagtcctgctcctttgttcttcccagccttgcaccactggctcgggggctctcaggtggcgcggccgcgaggcggaccctgatggccatggtggcggtgccgggagccacgctgtccctgggccccggcccgaggccggcaggaccgagcggggtccccaggagaggggtggcggggagctcgatctccacgcggggaccagattttcggcctcaaaatagaagaatagggctttgtgtggtcacagctatctctttgtaaatatttggccaactaagctgagtggctaagttctcctgctgcccggagcttcttggaacatgtttccttttcgcaaggggtttccctggcttccaggagggccaggaagaaattcgaattggccaccgctttctctaaaatcactccgctcaagttatcacccctctgggctcccgaagaccggctggctggaggctggagatagtctcaatgctcgaaatgccgtaaccgaagctccccgcggcgccggcactgggatccagggagctgctgctacagcgcagctctggattcctggatgtgttggatatgtgcagggcgttcctgggaggagcggggagggagggtgctgctggcggggctggtctgcgtgtgctttgcttctctacaatggcatgctgcgtgtcggccatgcagaggcatgtcagtgagcaggggctgagggatctccctaacggacctgctttcagagggtcttttcatgctgggagaaccccagagactaaatcatgcagccaacggggtggtccccggcctcaaagcagggaggggcgaggagctttgtaggcaatgccatctgctcctgaaacgccgtcccagtgactctggggactgactcagcctccagcctgctgcacttcatccctggcccctctctctttgctttttcatgtgaaatctgctgtgttttggtcagaggtttggggaacagctctctgctcatctaagataagtttgtaattcctttcctggagaaaaatatgccacccggaagcaggttgagcagtggttttctggcaggtctgttcggggctgtggagacagcacctgctggatcaggatggagttggaatttggtttggatcccacatgagaaaacccgttggaagaggaggaagcagaaaaaggccccattccctaataatgctgtgggttttcctcctccattcattgccaccttgccttgaaacttaatggggccacgtgtgtttccatgaatgtcattctctttggccaactcccccggcagccccaggagctccttttcaggaaaaggaagaaggtgtttgcttagcatctagtatacgagtccttgttggaaaggtgggattcttgtttctccttgggtctcttttaggctgagatgtggtcaaggaaggcctgtggtgtggctcgccttttttaatgctcgtctctggagacctgagttgctgctgactcccagcttgccccttctgtcccctggccatttctgtgtcggggtggctgagacactattgcattggccactttgtgttcccactagcccccgcccctgtaggctgtcattgtgatggtgatggggccaattcagctgcggtggggaggacccactgtgtgcgcctggggggtggcgtggggcactctgggatgagaagatgcgacttctgccctgagagccctgctttaatggaaggcgggggcatagttgcaggcagaagccatcaagcactgtggtcagaccagcattccatgtcaaaaatggccttgttggccgggcgcagtggctcatgcctgtaatcccaacacttcaggaggccaaggcaggcagatcacctgaggtcaagagttcgagaccagcctggccaacatggtgaaaccctgtctctactaaaaatactggctaatccgggcatggtggcgcgtgcctgtaatggcagctactcgggaggctgagacaggagaatcacttgaacctgggaggtggaggttgcagtgagctgagattgtgctactgcactccagtctgggcaacaagagtgaaactctgtctcaaaaaaaaaaaaaaaaagccttatctgggcctgggatctgtcctccgaacactgggtccactgtgctccacaaggactttcaccccggaagccctagacccacttgggcaaccagagtctctgggttgaccactccccagccctggccagcctcctgggccaccgtattctcccaacttcctgttgtgccacggctggtccaagctgctcttatcagacaatgcgaggcacttccacaggaggggacaaccccgtccttaggagccccttctccctgcccccaggcctggtgcagtgtgtggcttccctgccggtgtcaaaggtctcaaggcccctttaagaagcctgtcaccaccaccagcagcttccgttatctggttcttctgtacatgtaagcctttcccatacaccccggatgtttagggcttccgccctctctccctggccgggagtgtgggaagagggctttatttcaatgcttgagagtagggtcaatggccagggtaagctgtgggggctcctccccgccggcccctctctgcagccctcaccttaacacagagcatcgataccacctgggctttgggaagacctggaggctgaccaccctggaggctcccagcgtcccacagccactctttggggaagaggcttcctgagggacttgtggcccttggctgggactctagtcccagagttctgccttccggcgccgagctttgatttgtttattgagtgccagcccggttcccggacaggtagggacctgttcccggagctcagcagagccttgggaagctttcccaggagggctcccgagggtggcggccatgcccagtccgctgtacgtgtgagtttgtttgatgaggaattggctgggaaggcgcgggtctaattacaggcccatgagggtccctctcgcccccacccaggaagcagcggagatcctggcacactcagcacctgggcctgtgcctgcccagctgctggtggaatcatgggagccttgctccggggcctgtagagcagcagtgggaaccttccccacctcagcccctcccagagttggctgttcaaactcgccgccgctcagcctcttcctcctctctttcatcaaccctgggaatcgcacactgcccaccccaccgggccccggagcgggtgcaggaagagagagcttaacacccagaggtctgggccttctgcaggcgcctgagctgctgtggcctgagctgggttccctgctggaaccatcacagtagacctaatgatctgcctgcaggagttgcttcatcccagccgactccggggctgcgggaaggggctgggccttggttttgctgggggtggggggtcagtgcaaagggcctgaaaagtggcagaggtgatggcccatctgtcctccccctggccggccggcctaaacgcgattggctctctttcttttttttttttccctcccttttccctataaataacactaaatgcgatttgtcaatgcattcatttgggttcagtagttggaccatgggcagaagcactccagatttgtcactttccctaagctaagggtggggaacaccctctgtgagatcttggctcctgagcgcccaagactgctcttggaaccccaactctgggtcggtctcaggggactgacgttgatggagttgctgacattgacctccggcctctgcatggccttcaggaagggggcccttcgctctctgtcccgtcgagcctggctggcagcactcccttctcaggcctgtgcccccggcagggcctgctgcccccgccctgctctgtgggtgccaggctccaagcaccaggtgactcggtcactgaatggtcactgaacagtcatccttgctggtgtccccagtggaatgtgcatggacgtcctccctcccccagatccttgtcttttatctctcagcctttgttccaggggccaccacaggaccaggaggtacgcagacgtgggtggcacatccactgggcagattcagccctgaacctgcacgccccctccaagggggcccccagcgggcggggttgatggtgccgtctctctctctgtcactagaacggacatgaggattgtgtcttgtcgatccacgtcctgagttcccagacgtcataggtgcttgctcaacgagtgtttgaatgaatggtcagcattgtgtgaccgcagattttcaacttttatccaaatagtttgtggtttctgtgaggctatcccgagacagtctcacaagaatctccattctccctgcacgctccgcacaaggtctccttggggggtttttcagaaaaagggccaaagagcagcatttcctcggggatttgaacacgatctcccccggggcaggggactgccctggaagattcccggcaccgcttcccatgcgccacgtgactaggagggtcttggggcaggatggtgtcttttgtgccttgtgtgctggggccggaggaaacactgcccgtggccggtgtcatctgccagccctgaagactaatgatgggctggacagtggccccattgagtgggagggagaatcgctgctgtctgtagctggggggccgggtgggtgggagccgaggccagggagaacagcgcagacctggcacggagaggcctggaggaggagcagggggtctcagccacccagggtgcagggacgccacacgaggagcaggtgtggtgtgcgtcctcctgcgggttctccacctcttggcttcgttacctgcactaggctttgtggtgagagggcacagagtggaggaaggtgccgtggctagggcaggccacacgctgtgctaatggattgctgttacctgtcgcctctgtggttttgctgtcaggatcctccagcaccaggtccccaccaccaggtatgggccccacaggcactactggctccccgaagccagggacagaccccatagacaatactgagtccctgcagccagggatgggcccccacggccagtaccagatctcagggaccagcaccgggtacccacagccagggacaggcctccatggccagtaccaggtctcagggaccagcaccgggtacccacagccagggacgggcccccatggccagtaccagatctcagggaccagcaccgggtacccacagccagggacgggtccccatggccagtaccaggtctcagggaccagcgctgggtccccacagccaaggacaagtccccacggccaataccagatcccagtgaccagcactagatgtccacagccagagatgggcccctatggccagtaccaggtctcagggaccagcgctgggaccctggatgactgaaggagggcacggttgactaaagctgcaggagccagcctggccatcctgaggcactaagccatcactgcggtctcaggggactcagactcctctacttgtcttcttgaattctggaatcagacacacctgggtccagcctttgcccccggggctgtgtgcctgggatggttgcctcacctccctgaagctcagtgagatggggacggctgcacagggcccggcacagatggcacccgatggcacagggtcacctgcttgcatccatacagcctcggccctcgctctggctgcgtaccgagagtcccatgcccagacctctgctgagtctccaagctcctggtcatgcctcaggcctcccgtgagaagcatcactgcatggaccatgcctcgggacctcaccttgggctgggaagcttgctccatctccccaagtctcccctagaggcgccccatgtcccatcactctcactgcttgaggggtcagataggggaacccagtgtgggaggcccagaggtgccggagcagacgttaagcgagttccgtgtttatgcgctgggccttggcagacaccctgaatgagcctcttccccaggaaggagattggggtcccagtccaagttgtggcctcaaaccctgtgaccaagagtggagaaaaggcaagacccctcctcccagtcttccagaacagccgatagtggtggaaacatggggttcacactgaatttccttgtaacttgttgaagagaatttagcccacattttcaggggtggaggtctggccgatttggcagtgtgcccgtccccctggccacagtttactctggaccgggcaccctggtgccctccctcagtgacgcagtgaagtcactatgacgtgtttagttggtgagaaagtgcctcctgtaatgttttactcttcttagagggtgaataagccttgtttattataaataattatttacagaatacatgaggtttaacctaactctgggccacggcagcgtcccctgggtaaacccacgcgccaccctagctagagcctgtgcccccacaggcttcctggactcaccctgaaggggggctggattttctgcctgtcccgatgagagggctgcaggacagtccccagcgagcccttctgagggctgtaacctcttcccctggtattttcctgctcgccaggaatgtttcaagcttccagcagaagcctacccaccatagtcgctttccaccctgctcaccatccctcctgccctcactcattcagcagaccccgtgcacagcccagtgcaggactcagggtgggaaggtgtcccgggtgggctggagcaaggttcccagccagggcggggtcccaaggtgggtccacagccaggactgtgatttgggaggcccctccctgccttgttccagccccggcaccgccgctgtccttgtgctcagtggagactcactggctccaggctctaaaacctcagcgaggtctgcagacagggaggagccccactcgagggtagagtgactgccgggtccatttgcctgttacgaaccacgtggcctcagacctgccattcctcctctcctagagctatggtcttttgtctgaaaaatggataatgatggttaccatgtcagggaccattttgaggacaaacggggatgaaactgaagaggctcagcacggaacctggacacagaagtgctaattgtgtgttaccagctgcggtggctgccaaggcccaaccacatggcagccacgggctgagtggcgggcgggaagtggggagcaggagcatgcaagatgggcattcctgaagtttctgatccagtgagataagtacacacccagctctaagatggagtgtcccaggaaggtggagactgcaaaggccttgtggcgcaggagtgtgagctgcacctctgggctctctagaatttcaccagagctcagggaggaggtcagctcagatataggggcaacgggagagatgggagtgagaaaatggcttggcgtctggaagtggagcctggaaaggtgggcgtggggacagaggagggccttgggggccatgggcccatgcgtccaggaggtggaggcagtgaacggggccacggtcggccccacacgtggcaccaccagccctgctgagcctgcacctgctcctcaggccccctgagtgccactaccacctggcaccccttggtctgattcctgcttcctgcccgcctgggaagagtgagaccacttgcctaaagtcccttagctgtccttaaccattctggctgcctcctggccctgtccagggttagccgttgacctgaactgcctggtgccacctccccagactcctggggccttgccctggcaccaacagccacctccatcttcatcattcactcgcacattcacccagcagtgctttttgggcatccactcagcaatatcaaggcgctgagatgcggctgtggttaagacccgggcccggtctgtgaggacctcgcagttgccatttccccagagcacagccccagccaggcacactgtggggtccagaaagagaaactaatacattgtgttcgtccattttgagttgctataaggaatagccgaggctggggggttatttgactcacggttctgcaggctgtacaagtggtgccagcatctgcttggcttctggggaggccccaggaagcttttcctcatggtagaaggtgaagggggagctggcacgtcacatggcgagagagagaactcccagactctttttttttttgaaatggagtctcgctgtgtcagccaggctggagtgcagtggcacaatcctcggctcactgcaacctcagcctcctgagtagctgggattacaggcgcatgccaccgcgcccggctaatttttttgtatttttactagagatggggtttcaccatgttggtcgggctggtcccaaactcctaaccttgtgatccacccaccttggcctcccaaagtgctgggattacaggtgtgagccacctcacccagccctcccagactctatagcaatcagatctcccggactttgtgaccgtggggagggcaccaaaccatccatgagggatccacccccatgacccaagccccaccccccccaggccttacctccaacatcagggatcacatttcagcatgagatttggaggggacaacgtccaaaccatatcacacgtgacctctctgtgcgtgcgtcagtttctacatctggttaagcagtagaagctccttctctgttccttgttgagagagcggtgggggagaaatgactcagggatgggaggctggtcccccgaggggccctggtgtttgtggagtgggagtgcgggaaggcccctacgttgtgtgtgccgtgctgggctggctcctcacagctcaccgtggtgctccccgaggactgctggggaggaaagagctaattaacttggggacccagctgctgaagttatcattaaacttgagcagtccaggggcccctctccttctgggtcctatgtcacccagcacagtggggcttaattgaattttttctcatcccccaaggctcctggctggcgtggctggggtttgggatacggggagcgagagggcttgggcctcttccagatttggagtgggttcaccagaaatggcccaggaaaccgcgggggccacccccagcagctgggggctcctgtggtcatttcctcttggtcctgttgagcagccctggcccctggagccctcagcaagggatgtgggggcctgccaggccagggtcctcactgctgccgctatgcacagctgcatcttgcatccggggagtggggtgccgagtggggtgtttgggaggcaggttttcccttgtcccttctgcccagagaccttggggatgagttgagtgagacccttccggcttctgactggctgtgtttctgttgccatcccccactccttttaagtggaggtttatgacttccttctttatttaaaagggtcatttagtgacttagcagatcccagtctgtgttacccagggcccttttaaaaatctgtggggaggctgggcttggtggctcacacctctaatcccagcactttgggaggctgaggcgggtggatcacctgaagtcaggagttcgagaccagcctggccaacatggagaaaccctacctctagtaaaaatacaaaaaattggctgggtgtggtggcacgtgcctgtaatcccagttactcgggaggctgaggcaggagaatcactcaaatccaggaggcggaggttgcagtgagccgagatcacaccactgcactccagcctggacgacagagtgagactctgtctcaaaaaaataaaaataaataaataaaaataaaaatccatggggggacctctgtgtccattggctggtgtgaggagagggtgaggagctgcagagaaggtaccaggctgaggaccgcccccacccttgggctacagaattgaaggaggggacacatgaaagatgttcctagactcgggctggaggctggggacatccgagggcaaggacgacgctgtccctgctcttgtttgcagaggagtgcacagggctcaccagcttcttgttgctgtttaagtgatagctttatggagatagaattcacatactgtgacgttgacctttttaaaatctacagttcaatggttttgctgtattcacaaagtgattgtattagggtcatccagagaaacagaaccaatagaaggtgtgtacgtgtgtttagataaagagatttattattatgaggagttggctcacctcattacagaggttggcaagtgccaagattggcagagtaaatcagcaggctggagacacgggagagcccatgttgcggctctggtgtccacctgaaggcccaagacccaggagagccaatggcgtcgttccagtcccgagacccaggaaaagcgcatgtgtcagtttgagtctgaagcaggaaaaatctgatgttccaggttgaaggcggttaagcgggaagaattctctctcactcaggccttgtgtcctcctattcagaccttcaggcctttgtcacaaaattacaaagacctgatcagaacaaaatctgagaaaaaaccctttccttctatcggttttggattcattggctgggaccctggaaattagactgacagagattaacaggaaacaagcataacaattcaagtaagttttacttgacaccgagccttcataaggaaatgaagacccagagaaaccgttagcctgagcggtttttgttttgttttgagacaaagtctcactctgtcgcacgtccaggctggagagcagtggcccgatcacggctcactgcagccttgacttcctgggctcaagctggggcccagctgccggccccgggagctgctctgaacccactcttaagtcccagctcagactcccaagtagctgggactacaggcatgtgccaccccgcctggctaattttttattttttgtagagacagggtcccactatgttgcccgggctggtctcaaactcctgggctcgagcaatcctcctgccttggcctcccaaagtgctggggttacaggtgtgagccactgtgcccggcctaggcctgaacagtttttatttgttttgcttgttttttaaatttgtttgttgcttgttttgagcagtttttttgtttatttcttttgcttgtcttttgcccaggctggagtgcagtggcatgatctctgctcactgcaacctctgtctcctgggttcaagccattctcatgcctcagcctcccaagtagctgcgactacaggcgtgtgccaccacacccggctgatttttgtatttttagtagggatggggttttaccatgttggccaggctgttcttcaactcctgacctcaagtgatctggccaccttggccttccaaagtgctgggattgtaggtgtgagctgctgtgcctagcctaggcctgagcgtttttatgctgggtttgatgaagagtggaaagtcgtgggaaactgtgacagagcaacaaaagatgagctgaacagtgagcccgtgggggtctcggcaagacctgtgtactggggcccctctcagatcctctgtctctggagatgaggctgttcctttccgctgggtgtagggagggcacctcttacgtgaggggcttatgatctacttcagagaaggggcaggtcagtgagttcttcttggacctgccatttcttaaattccttcagctgaaaatatttactatgccaaggcactgtatcttggagtgtgcgttccaagccctgttgccttcaactgatcgggtgaggcccacccccatcagagcacacagtctgctttacccaggctcctgattgcacccttttcctgtttgccccgagaatactcaccagcagtgcttgtggctgcagcgttcaccccaagataaatttgccgggaagtatcttgcttttattattattttcacatcactctagtatatcgactttggaaacaaaagacatcattctgtttatagcattccatttttagtagtggtatttcctttaaaaaaaaatggtaattctcagctgggtgtggtggctcatgcctgtaatcctagcacttgggaaagctgaggcaggctgatcacctgaggccaggagttggagaccagcctggccaacatggtgaaatcccatctctactaaaaatacaaaaattagccaggcgtggtggtaggcacctgtaatcccagctacttgggaggccgaggccggagaattgcttgaacccgggaggcagaggttgcagtgagccgagatcgcgccattgcattccagcctggacgacagagcaagattccatctcaaaaaataaataaataaataaaatttaaaaaaaaatagtaattctcgatcgctgaaaatgtcaaatcctagagaacacagcattcctacaagtgatgttaacattgttcttgatcagttgttggctgaagattcatttgatgaatctgatttttccagaatagacgactcagatgactctgttgttttgcttagaaataactgcaggaacaatttaaaaaattttttttctttttaatttttttgttttttgagacggactctctctgttgcccaggctggagtgcagtggcacgatctcggcttactgcaacctctgcctcctgggttcaagtgattctccagtcttagcctcctgagtttagctgggattacaaggtgcctgccaccacacgtggctaattttttgtatttttagtagagacggtgtttcaccaggttgaccaggctagtctcgaacccctgacctcaaataattggcccatgtcggcttcccaaagcgctgggattacaggcgtgagccaccacgcctggccagtttttatatttaattttcacacagagcatccagtcagatttgcttcagcctcaaagagcgtgtttatgtaaaattaagtgagtgctggcagtgagctgaactttctaaaaggtaaaagggttaaatattaaactcatccaaaaacaccttcacagacacactcagaataatgtttgaccggttacctaggtgccccatagcccagtccagttgacacagaaatttttttttttttttttgagacggagtctcgctctgtcgcccaggctggagtgcagtggcgcgatcttggctcactgcaagcttcgcctcccaggttcacgccattctcctgcctcagcctcccgagtagctgggactacaggtgcccaccaccacacccggctaatttttttttttgtatttttagtagagatggggtttcaccgtggtctcaatctcctgacctcgtgatccacccgcctcagcctcccaaagtgctgggattacaggcatgagccactgcgcccggctgacacaggaaattaaccatcacagttacacagccatcgccattaatcccagcacatttcatcatccccaaaagagaccctgcccccattagccaatccccattcccaactccgggctctcagcccctagccaccgctcatctgccttcgtctctatgaattcacctgttctagatagtttgtataagtggaatcgtacagtatgtggccttggtgtctggctcctttcacttggtagaatattttcaaggctcatccacattgtagcaggtgctggtgcttcattctttttcatggccgaataatattccatcgtggatagaccacactgtgtatctcttcatctgctgatggacatttgggttgtttctgctttttggcataattctgttgtgaagaattctgcagtgagtgctggtctacaggtttttgtgtgaacatgttttcatttctcttgggtaattgcaagatcatgtggtttagccaaccagcctttaagccatgtgtctgctgagggacccaggcctggtgggggtgcattgctgtgcttggccagccaggtgctgcgagtccgtgtcgcagccatttctctgtgctgtgctctgaggttgtctcgccggcaccgggcactgtgagccccaggaggccaaagccccctttgttttatcttgagtccaggcctcgctccatgaactaggatgaatggacattgaatcaacgcagggatgggtggggctggggtggggacgcagagtgaccccgggggcctgcagctgggtcctggctgctgacttccagtttcctttgcctgttggagcccagaacaagtcagaaaggggaaatgcaaagttcgagtgtcttttctgtggtagactggcaggcctgggtgggtgagccacttgcagctagttgcagcgtgagagaggaagtgggaggggagggagagggtgagtttggtgtaactcacccctggaaggaggctgggctgaggctgggggaagtgacttttatttttctgagaggattcttccctggggccaacttcaaaccaagggagacaagaccttcctgggggaggctggaagtgctggggcccccaggtgggcaggtctcccagggccaacgtcttggggaagctataagttaccatgtttctggactgtcacacacacacacacacacacacacacacacacacacacacacacacacacacgagtaaactgtaacacaaatgtgtgcccatgaaagtgcccactttaaaccaccacacagcctgtaaagcgaaggccctggcccgcatctgggcacccactgcccagccagccggtaggcagtttgcactgtagtctgttaccatccctcagagatgcagccgaggagcccagctggcttggagggcccagtgggcgcagcctcaggaaagtggtcaggcccgggccaggccccttccccctcccagccttgggagaaattaccatatgaatgtagctccttcccggagttcgggctggaagggcctgggaggggacaggctcccaccccaggagcttccaggttccggctgctgcctgtgttagctgcgtgagcgtgagcgagccaggggtcactactgggtggaaggaagaagcgggcatttcttccaggaggtcaccgttggagtcccacagtaggtcaaccccaggccctgggtcctcgggaggaggagaaagaagagaagcaggaggtgtggagggtaggccaggaccagaaggcacacagggtcggggcagtgtgggagaccctgggggctccctcatttaaccagctaacatcacagcgttcataagaacacgctattactgcagttttattactttgctctgatttcagaaggcacaactgatgactttagggaacggagaatctgaggaaggcctcgcaggagagggtcagatgcgatcgagtaaatgtgagccgtctgtaaactgtagagtgcacgcacagcaccggtcagccctggggtcagtgttcccctggtgctcagctcggcctctgcaccttttagtgctcggctgggctctgtgggggtcagggctgggtctggtacattagaggacttctaccaagcccctggcagtgtctcagttactaaatccagtttgccagttactaaatccgctctgccggttcccgaatcactcttccgctggggccggccatgtcacgtcaggcttttcatgcaggacggcagatggatagacgctgggaccaagtcatccttgggccgcgagacgtctgaccttctgctggtgtctcagaagatgctagctctccgtggcatgtcttccacgcggtgcttggggaccagtggcctctaaggggcccccctgcctcagcgtggggagtggcctggccaaggtctcagtgtctggttggagccaggcataggctcaggtgtactggctggaggcctcctgcccatgggctctgcctgtcctgtgtccctggtccttactgtgtcttctgtgttcctgggagagaccccaggggccctgagcccagcactggggttggggagtgggcggggaagagggtggggattagggtccctggctgcagaacagccaggccccaagtccccactccactcccctcccaccgggcgcctcatcccacactgaccatttcctgaagaaaatttcctgaaccggcctcccaccccggctgtcccaggaagcccatccatccttccgccttaatgctttgtggctccagaaggatggtggaagccggaaatcatgagtctcattcacaggcggccacacaccgaagccgcggagacgccgtgggaaaggactctggccagcgcggccggcacagagggagcggtgttaccggggtagacgggaaccgtggctgcccccatgctggtctgggagagacgaggggccggacgaaaggacagcagactggccattcattcatttattcattcactcattcacagcgtcttactgggtgcttcggacgtgtaaggttttgtgggtagtgaatgcgacagaccccagacagcaatcggagggccacgtgtgtaagaactgagggacctaggctgggcgtggtgtctcaagcctgtaatctcagcactttgggaggcagaggcgggcggattacgaggtcaggagatcgagaccatcctggctaacacggtgaaaccccgtttctactaaaaatataaaaaattagccgggcgtggtggcgggcgcctgtaatcccagctactcaggaggctgaggcaggagaatggcgtgaacccgggaggcagagcttgcagtgagcccagatagtgccactgcactccagcctgggcgacagagtgagactccatctcaaaaaaaacaaaacaaaacaaaacaaaacaaaaactgaggaacccagtgtagatgagctatcccgggaaaacaagtgggagttctaggaacagcatggggaagggatggtcccggcagggaggacctctgtgggtagccttgttggaagagctgaaaggcagccagagaggctgtgcgtggatggaagctgaagagtaggttaggggcgtgtgttttgttaacaaagacttcaagcatttactgaccaggcacaacactatgtgcttcataaataaatatctcatttgatccccagcattcttatgagacagatgttattatcccatttcacatgtaagaacattgaggcacagagtggttaagttacttgctcagggtcacacagcacgtcggtggtaggcaggattctggagccacaggaatctggtatatcccaggtgcaatggaaaccagtcacggcttcatagagggaaatcatcagattagtaaattttacacacgccccctggtgctttgaggaggagggattcggacaggggcagctaatggtggtggctgtgagatgtgttgggttaacattgatgagagtttgggatggatgagtggattcggagtaatggaaatggagggcccaggcccggcccctggagatctagctgcaatagctgttggctggagaggctgttcacttagatgggggatggggtgggaggcaggtgagatgagagctccagagttcagcctggggcacggtcattgggttcaagatgccttcagatgttggggcttgacagtgacagtggctgcagatacccaggacccagcagagggcctggcacagcggggcccagggacacgtctgtgagtcaggctggcactcaagtgtgaatctggacaaagaaggtggcattgttggcattgaatgctcaggggctgggtgaagtcagctagggagaggggctctcaaggcaccaggactgactccgtgggtgagggcggaggaggagacggcagaggctgagagaatagccagagacaggaggaaggtcagcagagccatgcacagaagcctggagaagatttgaggaaaggaagggctgggtggtcgtcattccctgcagctaggaggcaagggtgacccctgtgtgtttcattcttcagaggattggtggctccatctggtcagaaccccaagtccagagatgcatctgagcttcatgccatggtgcaggcagcaggagccatggagcaggcctgcggggtcacggcctgcctgctgcttcctggtgtctctaccctgagctcaggggttgcttggatgccctgtgctgcatccccccaggcggtgttccagagaggatgaaagtggctatctcaaggtgtgaccaggtagcggtccatgcacactgctttttcctggggagagtctgggatggaagggtatgtgtgtgtttctgagactccttgaataggctccatgtacctatccacccatcttaccacccacccacccatccactcactcacccatccacgcacccacccatccacccatccactcatccacctgtcaacccatctatccactcattcacccatccactcatccacctatctacagtcattcactcatccacccatccactcatttacccatctatccatccactcatccacctgcccatccactcacccacccatccactcatccacccatccacccatctatctatgcactcatccacccatccactcatccacctatccactcattcactcattcactcatccacccatccactcattcacccatctatccatccactcatccacccatccactcattcactcatctgtccatccactcatctacccatccactcattcacccatttatccatccactcaaccatccactcatccacccatccactcatcatccgtccactcacccatctatccacccatgtatccatccactcatccacccatccactcatctgtccatccacttatccacccatctactcacccacccatccactcacccatccatctacccatcctctcatctatccatccactcatctacccatccacttatccatccatccactcatccgtccatccactcatccacgcatccactcacccatccatctacccatccactcatccacccatccacttgtctactcatccactcacccacccatccactcatccacccattcactcatctactcatccactcatccatctatccactcatccaccaattcactcatccacctatctactcatccacccatccatccagtcattcatccatttgctcattcatccgccaacccatccattcacctgcctgttcatccacctacccatccattcatccatctgtccatccatccacccacccactcacccattcacacacccatacacccatccatttatccaaccatccatccccatccttacttcagaaagcatttgaagttgctggggtgtgcacttggaaaatgcgtcataagctttcataggcctctctttggcttcctcacttctttgattggtctttctttcggacatgcaggattctgagcagctcttctgggaggtgggtgcagtccaggtaggctgcctgcaaagctaggaccgagggagccacatccaaggcactgtgggttcccaaggcgatggcactgtgggcccactgcttccagacctcctcaactcccaggctcctgagcaggaggactcctggggcagggcctggagacgggaagagaaaacaattccagtctctcaactcttgtcagtccaggtgggtgctgcatggattgggggcacctggaacagttggccccttcacccctttcccccacctttccagcccctctggctataatcagacagttgtgtgcgatgtctttctccctcctgaaggggtcatttagtcaggctcctactcatggcccaggaatgtgcccctccctgcctgtcccctacccccaagcaggccgtgcctccagccccctgctgtctctgaagggcctgggcatggggcagcctctgcagcatccccagggcccgagctgatctgcacagcagaagggaattgggggaaagctttttttctacccagcacctggcagggggccaccctgttgcaccccagagacccttgtctaagttttgttatttcagatgatttcataagttgggggaggcggagccccagcccccacagcccctgttgttgcctcactgctgagctctgctgtgtatctgctgacaggtctgctgatagcagaaggggctggagagagggaagctctgggccctgccctccccaacccctgcttaggggacatccctgataagaggaaattccagcctgtgacagatggccagtgtccacccacccacgggggaacttttctttctctttgtaagtttgcagatttgccaggaactaaaggaatctctggttgacaggccactgtggacatggctggagggctggcacgggctggatcttggggttgctttgaggtaggggccgctcctgctggaaggttccttggggtggggaaggcatcagggccattccctgaccctccctctgcagtggatccacttcagagcctgagacaaggcaagggggcagcagaaaacagaatataaaatagccccccccaccacacaccgcaccagaagtcagaggattcatccttggcctgccctccctgcagcctaagttctgagagtggctctttaggaagtgaatggtgatggtttgcaggtcagagcttgctctggcccaagattgatgtctcaataggccgcggagcctgggtgaaaaaactcaggctagggaggtggtgggttgcaaatgaaagaacagaggagggcctcttccagaaagcggcgggtggtgtgaggagcccttggaccttgtccaaatttgactttaccgactggggccaattgaaaccgtgctggcagaaaggcaaaactgcttgagattccttcctccacaatagaggagaggtttgcttgaaagggtttggcgagggaaaagctggaggaaccttggccggcagtaaaagtggggacccccgccccctgcctcgggggcgcctcggcccctgaatgaatgaaagaggaggctggatggagacagactcacaccacctgtcccttccaggtcctgcaaaggagcacacagggttcttgttggctcttccaccttgttagtcaccaagaaggagaaaacaccaacaggggaactgtaaagctgcagttttgtttaagccccatagtggaaaccggaaagagctccagctcggagaaaaatgcagctctttgcctttgcaaatccgtgtctttctctgggaggccagagccattgtgctcgatttctaagcagggtttcagagtgtctcaggaggggaaggcagagtctcagatttccggcatcccaggtcctaaccaggctttgaggagacgcttcctgtcccatacaaagtgtgaagtgtaatttgatttggagttagttaacaaattagatgagctgtgtgcattttaaaaattcagtccttgatcccccacccacacacatttgcacaatttggtcatttatattcagtgtttccatctttagaagagaacaggaagtccccagtgacatttatggagtgtttgtagtagcttgggtaggtcagtaggaacacaatgcagtgaaaagcagagttgagatgggaaaatatcctgttttcagagccccccagggatgacattccttatcgtctctgtccacccgctctggagtccactccgcaaacagcaacttgttctcacttgagagcttcctcctgccggagctcagggatggagagcagctggcctcagtcttctcctcttacctctttgtttctcagactcatcttccaccttgaataattgtttttaacctgctctccctcttctctagctgtagaacccagaactttgtgtgtgtggtcaaaagtttagagagtgctgcaggtaatgctgagataaccctattaaattctgtaagttctcatcacaccaagtttgtttgttttttttaattctcattttattttatttcattttatagggatggggtctcgctacgttgcccaggctggtcttgaactcctgggctcaaacgatcctcccgcctcggcctcccagagtgccaagttatttttttaactgggatccacgggcctagggattctttgatgaaccgttcaaaatacgtgtgtgtctgtctgtctgtcttcaatgtatacttttctagggagagtctttacttttcaccagaggtttgtggcacacacatgtcctgtactactgtatcagattgtgaattccttacatgttaaagactgcttcaaatctgtccggaagtctcggctaataaacatttaaataaatgaacttcaaattcccatgtgccaccactgttttcattctgactactctcaagcctgtagtgtcatctttttgttactgtgaagtagacactcaataaatacttgtcaaatgaatcaatgttatggtcctggtccactaggaccccaggatcatcgtctaccattattgtctatagtttctttaccatcttgttccagagcagttctttctctgaggtctgctcacctctgcacgtgtgtctagtttccagccctgtcgccttaccattctctttcctttacctgcatttcctgaactgttaatagttaacaatagcttctccctccacccactcactcatacctgaagtgagaagtcatcattgaggtctctgtggattttgtcagcccaacctggggcggcctcctggaggtggagttttcagatgagggatggacattttggtgtctgctgggtagatctacctgggagctttggcaggggccccagggcagctctgcctctttattttggctgtgggacccctggtgcactagggtttctcaagtaagcatctgtgtcctgggagagccataggcaggcctgagagggcccctggaatctgggacccccagcccggcccagtagctggtaccatcatctttcttgcaagggaagttatggaaactaagatgctaatgtgctttgataggcctggggtggctctaagccctgggaagagccctggcaactttccctggctggcgggtagaatcttctcctggcagttcagggctctgcctccagctccctgggggagagcaactgagggaggagctggaggccaaggcctcagtgctgagctgcctgcaccgcagctgcaccttctgggtcctggctgcaggaaccccatacttctccagcctttccatggttcccgaagacctggcctggggagggggtcagcagcctggggctcacctacctggcttcaaatcctggctctaccgcttactcgctttgcgaccctcataattgacaaaagccctctcggtctcggtttccttatctgtgaaatgggacaataacagtggctaccttataggattgtgtgatgatccatcagttataatagctcctgagcagcgtttagagtaacacctggggctcggtgcagtggcttatgtctataatcccagcactttgggaggccaaggtgggaggatcgcttgaggccaggagtttgaaaccagcctgaccaacattagtgagacccactctctaaaaaaaaaaattagagtaacgcctggcacagagagcccccagtaaacctcggctgctgtgatgagctttgtttcttcatttgttcattcattcaccagactttttgccggggcttgccgtgagccctacgctgctctgaagaaagccgggctggggtgagcgtgatggatgaggtgtctggcttcacaaaccctgtgtgggggggttgtggtgagaggaaaccgcacacatcattattcagttaccatcgtggggagactgtctggacgcagagagcaggctctgtgtgggagcggggagggcaagccctggttgcgaggcagggcttccccaggattcagcagggatctgaaggactttgcaggcacccagggagataggagaggaggagggagcagccctggccggacactgtcctcctagcattgcctgcatcagggactcactcagctttaagaagcccctttgtgggggacagggagcatctgttagtttataggacctgaagtgcccccatgggctcaagtttctgggaaggcctgcaggtggccgtagggctgccgcaggggtgctggccccagggtctggattcaggggagcctgcagagggagggcagctggaggctgctccagtgtgcattgttacgaggcaaagtaaggagactgctgggcccacgctgggccggggtggatggaggcaaggaagtcttcgccggggcaagggcaccagctgtagatgccggcagctttctcctggacacgggcctggaaggctgacagggtgtggtgagtgccaccggctcccctgccgtggcctggtcagtggcttcacaggcctccgtgggcaggaggaggatgaccttgcattctgcttggccaccattggcagtgacagacaaggtgtgtggggatgtggccatttcggtccgtgctctgagagccaggtgtgggttgggtttggggaagacaggggaatggcattgacttgaccctgagcactttgtcctggggtgcaggcccggctgtcactcccctggagctgggaatggcattgggcggtggctcagggtcccttgccccagcggcaccatctctgcatttggccagcaaggctgatgggacttgtgtggacatttctgggacgtagaccaggcagcatgacacacagggaggggtaggcagagaagggcggcccctgggtcttggtttccaagtcaggctttgcaagcctgctgtgtcaagccctctctcggcaccaggccaggtgggccagggtcagccctggggctgtgatgagtgtgagtgcccctaaagtgtgtcatgtccaatagctgcctcctctctgggcactgcctcccagccagatatcctacagcccccgtcccagccacagacagcaatctgattccctcatcctcggcaggtcctggggttggggtaagaatttgtcactaagtgcagatgttcccagagggtgctggctcagggctgcgtggattacagccctttcatccctgccttagacccacctgcaactctggagaaaagatggcccagtggacgcctgcggggaggagggagctggtccccaggatgagcagatttgggggcagtccccatcacgggaccggtgacctactgccaccagcgccagtgaatggcagaggggccctggcataaggcctgggttcagaatgggaacctgcagagaaactgtcaaggtctcccgccacctgacacctccgcctggctgccaccctagaaacacccttgctgcaagaagatgggggagtttgtctggggcatggtctggcgacaccaacttgagaacctcaggcctaagtgttggcctctgggcctcagctgtcctctgagctgtaaagctggctcctgggcacttgtggaaaacactggactctttattttattttactttacattctgggatacatgtgcagaacgtgcaggtttgttacataggaatacaagtgccatagtggtttgctgcacccattggactcttcaatccagctccactagaaatgactgccttctttcccttcttccgtccctccctcctcccctcccttttttccttccttccctgtttccttccccctccctccttcccttctttcccttcctctcccgtcctcatggggatataatttccatattacaccatccgccgattcagaaagcacagttgagtggcattttttcacaaccttctataagcatcacctctaattccagaacgttttcctcaccccaaaaggaaacgccatcctcggtacacagtcactccccctcccccagcccctggaaatcaccaatctgcgctttgtccctacagatgtacttattctgaacatatgactagaaccctaaaagatgtgactttttgtgcttggtttcttgcagttggaatgttttcagagttcatctgtgttggcgcacgctcgtgcctttttatggctgagaaatagtccgctgtgttgactcagcacgttgggtttctccacgcatctgttggcggatgtgttagttatttctggagccgggtgtgttgtgctactcacgggctgcactaggagctggggatatcactgagtaagccacagcctcgggcacccaggagctcgcagagcaggagctgggagggaggtcaggaggtgcatggcctgtttgccaggctggagagacttgcaaaaagtcactttgagccagaaaccagagcctgaggcctctgactcccagctgcggagccgggagggaagctctgcattttgctttgactgtggggtgacgtgtcagttactgtccaaatcagaacctttctgagagtcgacgtgggtactgctgataattagtctggatacccgaaagaatggaaagcagggacccagacagatccttgcacaaccgtgttcgtagcagggcgaggcctggaggtgcgatggggatctcaacggggcagctgccgtcttgctggagcccacggtctttggggggggtcacaggtgttaaccgcatatcatacaagcaggagtgtgaaatttcagggttgccaaattcagtgagggtcttgtgctggcctggccacttacagtggcatttcaggaaaaaaaatcactctatggacctcagtttccccattagtaaagagtaggttggactggaattctgtaccatccagtatagttgccatttatgaaatgtggctatttaaatttaaataaaaatagaaattccgttcctcagttggactagctcagtgtcaagtgctcagaagtcacttgtgaacacactgtggcaattcctcaaaaaacgaaaactagaaccaccgtagcatcccataattccacttctgggtgtggattcaaaagaatgcacagcatcttaaagagctagagatatttgtacacccacattcatagcggctctgttcacagtagccagcgggtagaaacaacccgaatgcccgcggtcaaatgaatggagaaatcaaaggcgggacaggccgggcgtggtggctcacgcctgtaatctcagcactttgggaggccgaggcgggtggatcatctgaggtcacaagttcaagaccagcctgaccagcatggagaaaccccgtctctactaaaacaaaattagccgggcatggtggcgggtgcctgtaatcccagctacttgagaggctgaggcaggagaattgcttgaacctggggaggcagaggtttcggtgagccgagatcgcgccattgcactccagcctgggcaacaagagcaaaactctgtctaaaaaaaaaaaaaaaaagggtggaacatacaaggaatttgactcagccgtaaagaggaagttaggatacctgcaacagcaagggtgaacctttcgggtattacgctaagtgaaataatttggtcacaaaaggacaatcctgtaggattccacttataccaggtccgtagagtagtcagattcagaaaaacagcagaatggaggttgccagaggcttgggggatggggctggggagttgtttaatgaggacagtttgttttacaagatgaaaaagttctggagatttgttacacaacaatgcgaatgtacttaacaccactggactgcacacttcaaaatagtgaccgtggcaaacgttatgacaattaaaaggaaaagtcacgtggccagtggctaccacgctgagcagcgcaggcctcggacggtgtcgtggtcacagacaatggagtgggtgatctttaccattgtttccagctgtctgagcaccatggtgtcctggggccaggatgaaagtgtctctgggtatgggggtctctgcttttcccacttgggagtcctgaaggcagaccccaaagctcacctggccaggtaggagagcgaggcgggctcttgcattgctctctgcgtgcgtgcctgcctgcgggccagccggggcctgcaaggccgcctctcgagggaggggttgcaggaatggctctcacctgtgcagaaggcaagccactgccctacgtcaatggcaaagatggggctcggctgcgttgtattattatttctcaagcggggcccctggtgggcaggatgtttggtttgatttgagtttctgcagtgagtgctggtgcctgtggagggacccagctgcagctgagccggcccctccctcgctctgggctccaggggcgttgggggcgagaaaggagagttcagggggcagcgcctccccccaggtcctgctggggagggttgagggatgctggggggaggtgggggcgggtaggggctggtcccagtcccaggcaaaatggctctcagacccacaggcagatggaagcgattttcggtcacgtgggtggggactgaactgctgccccgcaaggcaaggccccatgtctggcttcaggaagcggccccaaagccacatggtccatggccagatgcagggctgtgtctttgtttatttaaaggtcctggaagcccaggggagagtatttctgaagggggagcaggagcaggagcaaagccctgaaggcttccaggctgcgtggcctgggtgggggccacgtgggggcacagagagaggagccctggcctccaggtccgcctgtgggtattgctctcagcagtggagatgtgtggacccccccttggcatttcccaacaaggaattatattgttcctttgttcccccaattccataagataggaattcctgtgccctgtggaggctgagaagacggggaggtgcctgtgaggataaaccagcccccagtttctggcttccagagtcttttcctctctcacctctgatgcctcaggcctggggagcctccctccgacaccctctgaccgctccagtgaaataggccgagagggatggcttgaatcggctggggatgcaggctgcagccagggggctcagtgggcatttcctgagttcggttcttgccccgcaagtggaagggcagttgaactgaagtctcccactgcccctcctggcctggaagcctgcctcccaccttctgggcagagtgaggagtgggcgtgggccgggagggctgcctcctgtctgggagggctgctcacttgcctgtcacgggggatgagccccctgcagcctcccgtgctgtggccctggctcccacgccggctccactcccctgtggctgcccctgctgggtgcccaccggtcccagggaaaagccactcccctcccggaggactggcgggaggggccctgcctgggagcgtgccgtgtggtccctgtcttagcgcaggatgcctgaggccagatcctccctgggaggcaggatggggcaaaagtctccccgcaggcagagcagggcctggatgggcccaagcagggacgggggcacagaacagcagccgcccagcctgcgtgggagctgagggccaccaagggcagctccagcctgtggggactagcagaggcaccacctctgtgaccagcgagttgtctgcacctgcatgcgcatgcaccagtgagtgtggcgagtctgaggtgtgctgggacctggcccgtgtaccagccagccctgatgggaaccagccccatcctgggtacccctggaaccccactgtgtgggagcacctgggtcctcagcaggcgtcttccgggcgtccgcccccagccccaggcctctgacccgtgtgtggtgtcttaacagcagccaggagcagggccatcgaagggacctacagacagaagaggctttagtgatttcgggaagttcagctccacgtgccccacatacccaagagtaaaacttggtcttggcctgtgggtgtgcagcccgtgggcgctggccaggcacacaagacggccgcctgggtcagtccagggggaggcagatgtggtgcaggggcccccctcctccatgagcccaggaacagctctgcatccaggcacccgccctgcacccagcacttttccttctcccaggactgctggctcgttctatgggattgaacacacaactccatggggaccgacgctggttctatccccctttcttacaagaccatccatggggatgtgggaggcggggacacacgctggttctatccccgtttcttacaagaccatccctcctgtgtcttggctcgtggatcggcttctaaggcctttgagtggcagcaggcggtacagcttatctgagtagaggtgaaggagagggccaggtccacctgggtggcccgaggcagtgtggagggccaggagaggagagcaccctccacccttgtctgagcagccctccagggtacggagacaggagttcagggtcagccctgccttggagcgcagggggcccccagcttggcacagctcctagaagaggagatgaaaaagcctggccttgggagtctggggatggagctttgctggggaggcagcgtggctgcaggatggcagctttttagaggacaccacggccagggacatccacccgggggaattctcaggggtcgcctgggcaagtcgcttagcctttctgagcctcagtgcctcagtttccccatccaaggatgggtgtgacaaccacctggcaggcgcctgtgtgtgagcccctgttccgctctaactcctctgctgttccttccccagccactgaggcggctcccagctgcgttggcgacatggccgacacccccagagatgccgggctcaagcaggcgcctgcatcacggaacgagaaggccccggtggacttcggctacgtggggattgactccatcctggagcagatgcgccggaaggccatgaagcagggcttcgagttcaacatcatggtggtcggtgagtcctcaccttgcatgccactcaaccaatgccggaaaccagcctcagcccccagggcggcccacaagcctttgggcttggtcttcccttctgtaaaatggggcagcaaccctgacctcaaggacggattgccagtgacattgcgtgtgcatgcatgcgcctgggaggagcccacagcctccagcggctcctcagaggggcctgtcctgcacatccagggcccctgagatgactttggggagcccaggccggcctggagcaggtcctgatgagtggtcgctgcctctgagcaatgacgtcagcttgtgcagagggttctgtggcagctgtcccctcactgttgctccagcctggccctccaggctccccaccgcaccccaccgcaccccggccagaggcttcccagcagctcagcttcagctctgccctggaattggggcctcgtggcttccacaccccctggtggccccggagagctggaggtcaccacgggaggtcgtcgatcagcacgacctgggcagggtgagggggccaggctggagtctacagtgggccgcctgttgtttccaaagccccccaggtcccattcaaacctcacagggaccctgtgaagggggcgtcccgttttccaggcagaagcgaggctcagggaaggctgccaaggttccttagctcacagggcagagaaccgcagccaccgttttgactcccagaactgtgttctgcccactccacggggtccagggaggggtctggggaagtgcccccgccaggtcacaccctaaacaaaggtgagcttgcggggtttctgcaaggtgtctgggcacctctcaggccgggcctgtttctctgacctttgccagccgtgcacgtccttcctgcccagctctgtggacgcaaacccacacctgccagcccgacacctttctttcctcttctgcactgatctgggccctggctcccctggggtcttggtgtcctctctgcttcctgtagcctcatgggacccggctgctcatggccctgctgtgctcacagctgcctggaagctggcagcctgcttcaagggagggcggaggtgtggggtcccctcctacggcccccaccctgttctgcctgttgtgggggacgtgcttgtaccctgaggattcagggctgcctcccgggaagatggctggagagaaagagaggggagaggcccaaaggcagtggccaggctgggactcatctctgtgggctacggaggggctgccctgctccctagccagggacagggtgagaaggacctgggaacctctgcgtcccagccatggcacaggccttcttccggagctttggccccaaggagagggagaggcagcccagcagccctcgccttccgtggctgccactgtgacagccttgccctctgggaatggtgcgcaggaggccacttcacctgtctgggcctcttcgccctttcaaccctgagaagaacagtggtcctgattccccacaaaatcactccctcccagggatgccgagtgaggaacaagacgtggggcagctctgctctcctccctcctccctcccatggcagctgtgcccacctgcagaggtgcaggcaaggtggaggggcacctgtttggaggtccacagaccccggggagaatcccagctttgtcctaactcagcggggtgaggcttgtgtgtcttcccctgggctcctcctctgtgagccttagcttcctcgtccataaaatgggatcatcccataaagtgagatcaagcgagctaggccccgggcagggtccccaacaggttgtggttgttcgagaatttgcagcagtggtgatggtggttgtggtgatgaggatgatgggggtggtaatgacggtgatgatgatggggtgatggtgctagtggagatgatggggatgatggtgatggtggtggtgatagtggtgggatggtagtggtgatgtgggtgatggtgattgtgatggtggtggtggtggtgatggaggtgatggtgatagtgatcatgagggtgatggggatggtggtggtggtgatggtgacagtggtgggatggtagtgatgatgtgggtgatggtgatggtggtgatggtggtggtggtgattgtggtggtggtggtgatgatggtggtgatgatggtgattgtggtgatggtgatggtggtaattgtgatggtggtggtggtgatggtggtgatgatggtgattgtggtgatggtggttatgatggtggtaattgtgatggtggtggtgatggtggtgatggggatgatgatggtgattgtgatgggggtggtggtggtgattgtgatggtggtgatgtgggtggtggtggtgattgtgatggtggtgatgtgggtggtggtggtgattgtgatggtggtggtggtggttgtgatggtggtgatgtgggtggtggtggtgattgtgatggtggtgatgtgggtggtggtggtgattgtgatggtggtggcgatggtggttgtgatggtggtgatgtgggtggtggtgattgtgatggttgtgattgtgatggtggtggtggtgatggtgatgatggtggtgattgtgatggtggtgatgggagtgatgctggtgattgtggtggtgaagggggtgatggtggtgattgtgatggtggtgaagggggtgatggtggtgattgtgatggtggtgaagggggtgatggtggtgattgtggtggtggtaatggtgatggtggtaaaggggtgatggtggtgattgtggtgatgtgggtggtggtggtgatgtgggtggtggtggtgattgtgatgggggtgatgatggtaatgtgggtgatggtgattgtggtggtggtggtgatggtgatgattgtgatggtggtgaagggggtgatggtggtgattgtgatggtggtgattgtgatggtgatgtgggtgatggtggtgttgatgggggtgatgatgttagtagtggtggtgatagtgatggggatgatggtggtgttgatggtgatagtggtgggatggtagtggtgatgtggttgatgatggtgctggtgctgatgattgtgatgacagtggtggtggtgatgagggtgacggaagtggtgatgatggcgggagtgatgggatgatggtaatagcagtgatggtattgtgatgatggtgctgatggggatggtggtgatgataagggtgatgatgatggtgatgataataataaaagtaacaataataaagggatacaccttgcagtatcccagttggcatctcctagatctaaggtgtcgtggctggaacattgacataactcctgacctgaggttggccaggacacagacctggtggacagagagagatggacgaggagtgtccgtccttgggctactaaacagttcaggccagggattcccagcaccagcctctgtcctcccaggagcccacacttttcctagaaaggtgttatcaaagtcagaacatcagtgtaatttagggtgttttttgtgttgtgtttttttgagacagggtctcattgttgcccaggctggagtgcagtggcatggtcttgactcactgcagcctccacatcctgggttcaagtgattctcgtgcctcaggcatgtgccaccatacctggctaatttttgtgttttttggtagagacagggtttcaccatgttggccaagctggtctcgaactcctgacctcaagtaatccaccctcctcagcctcccaaagtgctgggattacaggcgtgagccatctcgcctggccgatttttgtttttttaaaagacagggtctctgtcactctggagtggcaatgatcctagctcactgcagcctcgcactcctgggcttgagcaattctcctacttcagcctcctgcgtagctgggactataggtgctcgccactacacctagccaatgtttacattttgatgtagagacagggtctctctgtgttgcccaggctggtcttgaactcctgggctcaagcaatcctcctgcctcagcctcccaaagtgctgggactacaggcatgagccaccacacctggcctagggtattttttttggtgtgttgctagcgtagcccaaggcagctctgtgcagggtaaagcaatggggctccgagtctggaggggtgtgtgtgtgtgtgtgtgtgtgtgtgtgtgtgtgcgcgcacgcgcgcgcgtgttatatgtgatttgtttgtgtgtgttgtgagagttgtgtgtgaggtatgtgtaagaggtatgtttgaggtgagttgtgtgtgtgttgtgagttgtgcatgtgaagtgtgtgtgttgtgaggtgtgtgtatgaggtgtatgtgagttgtgtgtgttgtgttgcatatgaatgctacttcctcatcctcgtttgtctcagtcacctgtggactggctgtctgcacacacggtcactgtccctcgagtggcaccaccctgcaggccagcgccccctagcacatggccccacagaccccatgggacatgcgtgagcctgcctgatgctcacaccagctccacgggggaaggactgtttatcccattttgcagatcaggaaactgagacacggtgaggtcaggtgacttgcccaggccctggccggtcagggaggagcagtttgaacacctgggctttggttgcaaccaccctggtgaactgcaggaatcccggccacctggtgcaccctgggcagccctgggctcctccgccagcccggcctctgtcctgtccaaaatctgagccaccaggagacctcctgtccagaaagcacaaggggcacaagagatgccgactctcccaggcccggctcacctctcaggagaggactgtggcctgggttgtgctggcatcagagcccggctgtgtgggtttacacagtcactggacacccggctcgagggtgaagtcctcgggggctgcttggcagggatattgccgggaggtagcccaggcactgctgaatctcagactggagagcctcgtgcctgggtgggaggggccccatgtgcagaccctgctggtctctccggagagacccctgaccggcctcccatcctctccccagggcagagcggcttgggtaaatccaccttaatcaacaccctcttcaaatccaaaatcagccggaagtcggtgcagcccacctcagaggagcgcatccccaagaccatcgagatcaagtccatcacgcacggtcagtggccgggagtgggctgggggtgcaggacgcccctgccttcctggagcacaggggttgggggtcaagaccatcacacacagtcagtggccaggggcgggctgggggtgcaggactcctctgccttcctggagcacagagtggggggtcaagaccatcacacacagtcagtggccgggagtgggctggggatgcaggacgcccctgccttcctggagcacaggggttgggggtcaagaccatcacacacggtcagtggctggggatgggctggggatgtgggatacccatgccttcctggagcactggtgcggtgtgagggtgcccgagtcaggcaatcccaggtccccaagacggggactcgctgtgcccaccatccccagcatgttgagcatgttggggctctggctgtgatgggtcagtgtcccggacccctgtgggccccgtcacactgagctccccacagacaactgagttttccaccaaaagtctgacaggcaaggggctcccaggggaaccgtcaccggcctgtgccggagttggctgaggaaggccattaatttcccggtgtctccttggttgtcatcgctgcctacctggggttgccccggggtcagtcaggtgtggggtgtctgtgagggtcttccgtctcccctctgactctgcgtccgtggctctgtgcagatattgaggagaaaggcgtccggatgaagctgacagtgattgacacaccagggttcggggaccacatcaacaacgagaactggtgaggcccctccagggggaggagcactagcgggggcttcagggctccctggaccccacccagagtcagccctagaggtttcccggcccgcgggggtgcagggcccacctcctgggacctgacatgctgccaaagccgcacgtctcaggggcctgaaaattctggaccaaagcagaattacctggggaatcttgctgtccccaactcatcacctgaggccagcccggggaggctggtttgggaggccgagggtaaggctgtggcatctccgctcagcaagccagacctcccagggcatgcatttcattggaaggtggggtgttgggctctgagtcctgggaatgcacgacctgcttggggagggcatctcatgtgcctgctgactcgtccccatcccccacgcagctggcagcccatcatgaagttcatcaatgaccagtacgagaaatacctgcaggaggaggtcaacatcaaccgcaagaagcgcatcccggacacccgcgtccactgctgcctctacttcatccccgccaccggccactcgtacgtccctgcagtgtcggcgtcctcatgccgggtgccctgggttccctctgtcccctgggactgcaagacggtgctgtctgccctgctgctgggtgcagaggggctgagtcaggggccatggccgccagctatgaagttgggggtgtgccatgtctgcacctccaaagcctcacactgacccctatgcaagtgtcctgcccagcccccatccttcagctgcgtcttggggagctgagggtcaggcaggccctgggctgttctggagcctggtggtctgtgtcctgccttctcaggccaggctctggcaggtggagtgggagcccccagccaagcacccgtagcggtgactgaccttctcatccgggccctgcctcatgggaccccttagagggtttggtgcgttcttagacgggaagcacagagatcagtgctggccccttccagggctggacggggctgctgttggtgttggtgagagccctttcctcccgccggctctgtccgcacctgacgtcgcccctagagatcagcaagggcgggaggctgcatgtaccctggcaggtggactcttcatggcctcacggaccctctgtcctcagctccctgtgcaccccctgccagacacctgtggctcaccctgagccagggctgggaggaggaggaccagaggccagcaggagtggctggtggaggcagccgtgggtggcttgtctgcatgggtgggtggagaaggtccttcgcacctgctgtcccagatgtacttccctgggcggaggaagcccaggggtttggggaaaccatactctgtgggcaccaggtgcaggaaggagcctggctggtgggcagcgggcctcacccagagtctgtgggaaaacccaagccggagttttcgagcccaccctctggcatcatcctctgtgggccagcaggagtcaggggcagggggccagcccgctgtccatgggcctctcctgaactgaacatctgccctcccaggcagaacggctcacctgcggtcctgtggcagctgttccagctgctccaagctttgcctcagctgaggctgatggcaggaggcagaagcctctcctgatgccagctgggcaagccgagggcgggcgggcggtctgtggcacttctgccactccccagcactgaccctttggctgggactccagctaggcatgttgcctggtcccgcccaaggcgtccagtcccatggggcaggggcgggccttggccatctctgcttaaacttctgcccggagcgggcttctccccagccatgtgtgtgaccgatttattctcactgtgggaaaagctcggctccagaactggggaagatggtgccccagttccagggccctgccagcccctgccacccacagctttccccacatcagaccccaggctcactggggccaagcaggcaaggggagcagcccgcctggtgcaggggagcagcccgcctggtgcaggggcaccgcacactggtgctagcttctatttctcttgcctctcccctcccagccaaagccccacagcaagacggctgctgagccaacgacagcccttctgtgtggacatgtaggggtgtggttgggaccccagaactcatggacgagggtgcttggagctggccctggcccgcctggcctgtgcagtggtgtcacctgtgtctgggacacacccgtgtccttcctctgccccacactcacagcgtggccgactcggcccggggccctgtccttgccagcagggacccccgtgagccccgagccagcacctgagagtgtcgacacctgcttgggggtgggtgcccccccactgccccgctcccccagatgagcctcacgcacatccctctgcttcagcctcaggcccctggacatcgagtttatgaaacgcctgagcaaggtggtcaacatcgtccctgtcatcgccaaggcggacacactcaccctggaggagagggtccacttcaaacagcgggtagggttccatctctacttgccccagcccttctgtgcaacctggagacgctgcaggcctggcaggggccaccccgtctaaaggagtcacactgtcagggagaccgaaccgctggtcactctccccagcgggtggctggcctggtggtccctggcccaggtggctgctgggggccgtccctgagatggcctctccagctcccccatatctcaaaagcagctttgtgggagtgccaattctccagcagagtctctgaggggggttttggagaagacctggaccaggcagatggtgaatctctcttccagggagtgaggccgagcaggggccgtgcgacatggcccaccttgttttatgccccccctttttttttttgagaaagggtctggctcagttgccaaggttgcaatgtagtggcacaatcatggctcactgcagcctccacctcccaggctcagtccccgagtagctggaattacagacgcacaccaccatgtctggctaatttttgtatttttagtagagacgaggttttgccatgttgcccaggctggtctctaacccttgggctcaagggatcctcctgcctcagcctcccaaagtgctggggttacaggcatgagccacctcacctcgccctgcctggtttttattagatggaagagaagctgggccaggtgtggtggctcacgcctgtaatcccagcactttgggaggccgaggcgggcagatcacttgaggtcaggagtttgaggccaacatgatgaaaccccatctctactaaaaatacaaaaatattagtcgggcatggtggcgggcgcctgtagtcccagctacttgggaggctgaggcaggagaatctcttgaacccgggaggcggaggcttcagtgagccgagattgagccactgcactccagcctgggtgacagagcgagactccatctcaaaaaaaaaaaaaaaaaaaaaagtttcaggagggatggtctctgccaccttcttctccgccaccgtctgaggcccctgctgtgggatagggaggggcatccaagcaagagggcagccctgggctcttcctcctgacagggcagcacatcagagccacatggggtgcctttcaaaatgaaaccgaggtgcctgggctgcggcaccacatctgcctcggtgggtgtgggtggggcctgtaacctactccgtcctggggccaggtgtcagggaccttcccagcatgtgcaggggaagacagtccacacaaagtgggtgtgtctgccggaggctacacacgggctgtggtctgtgcctgggcaggcgagcagccgctcactgggatgtttctgttgcacgtacccatgtcgggctgctggcagggagctgagaggttactgcaggcggggcccctgctggaactggggactgtgacgagggttttttaggaagggtttcaggaggggaggtctcggtaaccctgagtactttcttggggctgtgatgagcaggagaagagaggtgggaggtgctcaggacgatgaccttaagcccctggggagttgcagcgtcgctcaggacagcaggtgcacctgcagctgcccctcttccctccaggaggcacaggagttggaggtgattggtgtcacagccccccagagcctgcccttgaacccgagcctggggcagcacacagtgtggaggtcatgtggcaaacaccagtgggtgggtagagcttgccacagggatgggcccatctctctccctccttatcccagatcaccgcagacctgctgtccaacggcatcgacgtgtacccccagaaggaatttgatgaggactcggaggaccggctggtgaacgagaagttccgggtgagtggatccactaggatgttgttcccaggggacccccagttcctgctgaagggtgggttgggggtttggaggaccttaagccatgaaattatattcttggggccagagggcactgagcccaggtgtctgtacccagtgctgtcaggctgaggctctcgtttttgggggaccccaggctcagggcagctcctcccgggggcccaggggagggaattgccttcccgcacatgtgtaaccaataccgtctgcccgttccccaggagatgatcccatttgctgtggtgggcagtgaccacgagtaccaggtcaacggcaagaggatccttgggaggaagaccaagtggggtaccatcgaaggtactcgccgcaggcgccggggctccagacagatgggaagacagtctcttctgctgacccagagcctgtgggccacgcctgagccagggactcgtggaacctcatccactgccttgccccacccagagggaggggtctccttgtccccattcaacccttgggaaagtgagagggcaagtggcctgtgcagatgcctccaccccagacctccccccgggcagggaaagattcagggagacaggagctgggatgggggccgccaagttctggatcctggtgcaggctctttcataggcacctgtgtggccctggacaaatcgcccaacctctctgggcctagaaaaggggtgggctgtagctctgtgagccagatggaccctcggccccttaccctgctgaagttcctgggaccctcacaccttagtctcttgagtggctgttgtaaccaattagcacaaacgaggggacttaaaacaacacaaacgtattttcacagttccagaggccagaggtccgaaatcaggggctgtttccttctgaggccctgaggaccagcctcatccatgccttcctccttctggtggcgcctggcattcctagttgtattgtaaaggcatcacatgctctaatctctgccccattgtcacagggccttcttccctgtgtctctgtcccgtccctcctcttcctttttttttttttttttttttgtttgagacggagtctcgttctgtcacccaggctggagtgcagtgttgcaatctcagctcactgcaacctctgcctcctgggttcaagtaattctcctgcctcagcctcccgagtatctgggattacagtcacgtaccacccacctgacttaatttttgtatttttagtagagacaggatttcgccatgttggccaggctggtcttaaactcctgacctcaggtgatctgcccaccttgcttggcctcccaaagtgctgggattacaggaatgagccaccgagcctgccctctttccttcttgtctttggacaaggatgcctgtctttggacttagggcctaccctaagtggatgatcccatttggagatccttaatgaatctataaagaaagacgttttccaagtaaggtcacaatcatgggttccaaggcctggaccttgaccatgtctttgaatggatgggagcccctggggggccacagttcaacccactcctggcggtgacaccccgggagggatgggcccgaacgtttccttccccttcctctctctgtcccttcatttctcattagaatggaagaggggaaggtgcagagggaaatgcagcaggaaaagccactttgttctgggagagcacttggctgaaaggcccagtagagcaggaagcacaagtctcttaatcttccagggcctcagttttcatcatccacaaagtgggtgcagtgtgccaagattttagtgagttgagagactgtcccaaagaccacagagctttttgggaagctgttgctctaaaaaaatggtcataatgacaattaccaggaggcatcagacactcctgtgccactggctagacatgggttatctcgtttcatgtccgaagctccccgcacccaccctccttgcagagttgaagaggtgctgtgagcagaaaacctgccaagggacccagaacgggaggcggctctagaatctacagctccagccctgcaccagactccctcgagatgggagttcatgcctggaggagggtgtggagaggcacacgggcctttcccctgtctgcactcctcccctaccaccacccctgccgggcccaccctgcgggagctgcccagctgggtgcagcctgggtgttttccagtatccgcctgtggtgtcaggctggcttgcctccccttggcccctctgcctgcagttcctctcttcctctctgcccaaagagttcttgctgtttaggaaactttttatgaaaggcaggtttgggagagttagggatggatgggcctgggacgggccggcggctttgctatgggcgtgcctctgctgcaccctggtggccaaccttgagtaccgcaggtggccggtgacagaaactgtcaggaaatgcacaagagagaggtccccgcacctctctgacctgtgcgttgttgagcaccactggctccagctgaggaagagtctggaacctgtcaggacagttgtgaggtggtggggcccactttccagcagtcttatatgaggaccctggaaatgtgccttcagcactgctgggtttttatatcaggggccccatgagttcatagctgacctgacacccggactagtaagggctgtgccttgttcttgcctcccacttggtgaacagcatcttgaggtatctttcccatccttagaaaccaccccaagtattgtcaatagaaatgtggggtgtaattgatcacgccatgaactcatttaatcctcatgtccctgagaggcgggtgacgttattatccacattttatggatgaggaaactgagggaatgagagtaacttgcccgagccagggagtggcgatcacacactccaactccagcctgagagccccattcttcctgccggctctcgctgcccgtcagtgttagatgagagtgctgctggtcagtctgcaggaggttctagtgtggacaccgccctacacagggccgtggcaggagggcctaggcaaaggcaaccggcatagcactgagagcacttgagggctgggcaaggtggaggccccggccctgcctgctggcctaccaagtaaaaactagacatttttaacttggggaaaagccatgtggctctgcgatggggcagcctggagccaggtgtatgggttctgcatcccgctccagccttatgcactgtggagctgagacagacacagttcttgcgttctctatgcctcattttcttttcttttctttttctttttctttttttttttttttgagacgaagtttcactcttttgcccaggctggagtgccgtggcgtgatcttggctcaccacaacctccacctcctgggttccagtgattctcctgcctcagcctcctgagtagctgggattacaggcgcctggtaccaggcctggctaatttttgtatttttaacagagacgagatttcatcatgttggccaggctggtctcgaactcctgacctcgtgatccacccacctcagcctcccaaagtgctgggattgcagacgtgagccgtggtgcccagcgtctacgccccattttcgtaagataatggggataacaaaggaatcacaagagacacttgcaggtgtgtgaagacgaagttcatcacatgggagggcaccgggtgtctttatttgccttccctgcccggctccccacctccagtgatgccgttcactgccctccttgttaaaaggccttctgttatataacagttacacatgccaggcaccgcgtgttcatataggagttacgaagcacagcaataaaatgaccactctgagatggccaccagctcgagcccgagggcacttgtgggtgcccgtggtctcctgcccagtctccctgagaagtggccactgtcccgagcttgggcttgtatgtattgtgtgaagtgcacatgtccctgagcaatgtttagcattgctgattcttgagcttgtgaatggtcgtccacagtacgtagcccctgtgtgtgtccctgtgtgtgtgtgctctgagcgcacacaaggtggatggggccgtgggggtaacaccctgtgggccacaggttttctttaaaatcccagctccgattcctgcttcatcccattcccagcagcccagccccctgcctgtcttcaggcccctgctgggacgtcctgctctccctggtcaccccagtggtgcgggggcccactgccctggcttctccactgtggcttccttccatgctcctatttggcctggtcactgtgccatctcccattagccaggaactttctggagagcaggagctgagctgtccaggagcaggagctggtgctggtcactccagtatcccccagactgagggcagtgccaggtgtcctatactcagctgcagagcaggtggttcccctgccctcctgcccatggggctgccctcagactctgcttttggcaccagcatttctgggcagggggagagaggtggggtccgggcagagtttctccactgggacattaaagcccctcctgtctcctctcctagttgaaaacaccacacactgtgagtttgcctacctgcgggaccttctcatcaggtgagagacagggtgcttgggtggggctgacggcttcacccctaagagggccctacagcgggtgggggcagtgggtgtggggccgaagccctgggcagagtgggtgccccctgccacctgcctgccctgccctcgggaagatcttggaagcccatcttctgaaaaagaaaacccactgggaaatgaagcaggcagtgaagatccttttcaacccctgcgaagttggctggatgggaaggctgagctttgatccactgtggtctggcccgttagagctgcccggtggccactaagggcccagtgaggcctcatgtgcaggccctgccggcagcgtggggcgtctccagctccgatcccactggcctctgacccctacccctttcacctggctgaggcttctccttgtttcccttgagtccaggcaaggaggggaagccctgatggagagggtgctgggtgggtggtccctggagtgtgggccctggcctgggcaggttcttcctcagcaagcagctggcatggatgatgggaatgttatcaagaggaggggcctccaggttggcgggggcaggggtggggggattccgggagccgttctgccattgtggggatactgggctttccaacctccctccagattattcctcctgagctgcagaggaatgaaaatccgagcccaggacttttttttcctggggacaagggcaacccagccctttgccccaggccacctgcctgccacaggccatagtcctggaggccggtggtcacccactgcttccaccctgccagcaccctggacaccggcctggagcaacaatgctccagccctgtccctctgagtctatgcactgtccctgggccctggacccagggccatagggtggacccagagggagacacatgcactggaatatgtgtgttctgaccgagtctgggcttaccagggggactgacccttcccccaaaacgtgtaccagatctggtccaacatggtgggcctgggggaccccatggggagccaagcagtcgggatggggagtgggggtgggggcaggcgggcctgagtccgaggcaggccgagcagggcccctgccccgctgcccccaccccgctgcgcccacctcactgacccgcccgccccccacccccacaggacgcacatgcagaacatcaaggacatcaccagcagcatccacttcgaggcgtaccgtgtgaagcgcctcaacgagggcagcagcgccatggccaacggcatggaggagaaggagccagaagccccggagatgtagacgccaccctgcccacccccgggatcctgcccccaagtcatttccgtccccccccaggccctcccaccaccccattttattttatatgattttctccatttgtcatcgttccccaccccttcgacatgctgccaggaaacaagggaaggggcctccctccgagtgagtcagtgatgaggccgcggcctccccgaggttgtggggaggctgcactggagccacaggcaggggtgagagcacccactgaattgacatgaccctctgtccccaggcctggctccccgagggctcagaagagcagcttcggtgtgcagatcatccgtctgtgtggggttctcagtgccggaggccttggggtgggggccaggcctcgcacttgcagaggagcccagtgggctgcacgctcccctccatccccatcggccctgtcccctggagtgtgtcagagcccaggggagaatgcagcccaccaggagcacctggaccccctgcccgccacatggtgtggccatcactcagcccctacccctgccctgctcctaagggtagaaaactccagggtcccctgccaccgactgcccagccactccaagccccctggcagctgcccctcctggagcagaaagtgcctttatctcagccatccgcagactgcttggccagatgcggggacaggctggaatgagggaggcgtcttcatctccctgccatccccctctcacgccacccccgcccccaccgggctgcaggtgctgctgatgcgctgggatctgattgaggataaaaaggaaggagagatgacccctaccccctcatcccccagttttgaaaaggtctaagcaagtgagtctggtggaggagctgagggagggagccatggaaggtgccagaaggaaggttggcgggggcacgtgtgggccgtggcttgggctggtcagagtggcgtgagctgcccggcgcctgccctgcccaagtgaccagggaagtgtgtgtgtgtccatgtgtatgcgtgtccgtctgtctgtctagtgtctgggtttggcccaagactgggctgtagttacattaatgcccagccagccacccctgccactcacccttcctggcccaggccttgctgactctctgagctggggaggtgggaggccaggcgagcctgactctgttgatctacccgtgcctgggcccctcccctcagagcccatggtaacgaacccctagaaaggagagaacgggcgtcaggggtgcacagtccacagctgaagagcaaggtttcgtggcagcacggcccggcccctcaccctctgtccccacgaggggacccatgggggctgtctttgcagggcacagatgaccaaagtcccttcctgcttcctgttacctgtcttgctcctggggagaaagaggggcctgatgagactccactcaggtgcacacatcaccaggtgcatctgcaggcaccgggctggctgcttgcagccaggagaaggtcagcgagaaggagtgtatgagtgtgagtgtgtgtgcatggaagttggggcactgggcgtctgactccctccccacccaagagaggaaggacccctcaccacccccactggtgagacagtttactttgccaacttgccatgtttttgccaaaaccaagattttgaaggaaatgagtggccagcgccagggcccaggccatgtggcctgcccagcctcaatgtcacttggtggcggggtggggtgggggtgggcagcagcatcccagccttgagatgcttcactttccttctctgtaaccagactttgaaaaattgttcgtttcatcaggctctgttcctcaatggccttttgctacgtgcctcccgagaaatttgtctttttgtataaatgacaaagtgttgaaaatgtatttcctgaaataaatgtttcaaatgcagaaacccagaaggctcctgagtgagaatgttttttctgcccctgaagtgcagttctttgggcctcgggacaggttggggtcagctgcaggtgggcaagaagcatgggcaagaaaaggtaggccgggcgcggtggctcacgcctgtaatcccagcactttgggagactgaggcagttggatcacaaggtgaggaatttgagaccagcctggccaatatggtgaaaccccgtttctactaaaaatacgaaaattagctgggcatggtggtgggcgcctgtagtcccagccactcgggaggctgaggcagaagaatcgcttgaaccccgggaggtagaggttgcagtgagccaagatcatgccactgcactccagcctgggcgacagagcaagatgccatctcaaaaaaaaaaaaaaaagaaaaggtaaggccaggtcagatctcgaattcagactcccaagatttgaaactaacaaactccctgagaacttataattccagagcactgtgaagagtgagaatagcatcaaggcgattgctggggcgttgtttaatctacctggggtaaaagttcccagggcttgagaagcactcagcggagatgactgaaaagtgaatggcagatctgaacgctttcattaaagtgggggatctgaagggcgtccacagggggcgctgtgagctgcttctagttagtgtatccttgaaaataactttttctgttttattttttgagacagggtcttgctctgtaacccaggttggagtgcggcggcacgatcacagctcactgcagcctctaccttccaggctcaagcgatcctcctgagtagctgggaccacaggtgtgcaccaccacacctggctaactttttcattttttgtcaagatgggatctcactatgttgcccaggctgatctcaaattcctggcctcaggtgatcctcctgccttggcctcccgaagtgctgggattataggcgtgagccactatgcctggctgacagtaagtttttcttttagaaatttatattagattgaactccagactggtcagtatttgacagttgttttatgccaacctaactcattccaagagaacttgattccaaatagattagaagtcagagccttggctgagtgagcttttctttgcaggtgagcttaggaagtaaggttcagggagctctggtccgtatgccctttgcgtgtgcagaagggcctcacccggatcccttctcccacgtgtattagtgccctgcagctgccttaacagatgaccatgcagcagggctgaaaacagcggaaatttattctcacagttctagaggccagaggtctgagatccaggtgtcccagggcctcgctccctccaaaggctctagaggaggttcctctctcctcccccagctcctgctggccacttcaccccatctctgcctccgtcttcacagccttctctctctctgtcctggagggtcaagagggccaagagggcactcttccaggactg

SEQ ID NO: 540 - DNA, 132800 bp, Homo sapiens
  source 1..132800: mol_type = genomic DNA
aaggctgccagcatctgcctcggtgtgcagggtggagagtgaacacttttcagccactgctcggagagactcttggttctgcagggaagggtgggcgtgcaggggtgaggccttgttggaagtggctgaggcattcctgttttgggagctaattggtggcagagggatggctgagatggcagaagctgcagcagctttaggggactgagggagctatgaaaatgaggctaggcccctggggcatcaggaagggtcactcatcgtggcctccatccccttacattctgactctccttctaaccgtggcctgagtgagagaagggaggtccgatgggccaggcgggaggggatgggggcaggggaggccacattcctggagtgttaatgatctctgggctgggcaggagctgagcccccaaaccagctaaaaacaacaaacagctcccaggagggatttgtgtctgtcctgagagtcaaggatttccgcccccggatggaggctgtggcctgtggagctcttagcaaagaaattccccagagaccagaagcctcctggcccagaggcatcactttgcaaacagctccctcccctctccctttctctcctctctctctagtggggaaggtcccagcacccaggaggggaggcaggccctcccccacacacctgggagcggggagaggagtctgggtgcattcctcctccagctttccatccttacaacagtccagccaagtgatgctgttcgtggcattttatagataaggtcaccaaggctcagttagagtaggtgtcaataaatgtctgacccaattgatgggtgaatagaggaagcatctggctagaagccccagtcatgctgggccaagctgcggctggaactggggtctatctgaccccagccaggatggctttccacctccctgcccgcttctctgcagggctggacttgggaactctgggggctgcctggaagaggaggaaccattgctatcaggagatgcccaagtcctagccccaagggatagtggaggagttaagaagaggcagagatctcagggctggtaccatgcacactgcagccatgaagcacctttccacttggctcaaaccttccctccctaggaggcctctcctggccccaggtggtccagaaatgaccccctccggcctcccagcctcatggatataaacagtatgggaatctaccaaaagtcttactcacgttccttgagggcgggctccttagtgagcgctcaataacagctctgtaaggggagtcctgcagaatttcactgccctgtgtcctcacatggtctccatcctttcctctccccttccctctgggcctcccagctggcccgatccagcctggaacctaggtctgcaccttccctggaggtattcccacaaaatcctcaggcagtccttcccttttcccactgggttccatacgccactccccttcccacccacaattcacaaaaccacaccctgatgctttaaatcccgtatttattgcccaaagctcattagtattacacaaatcacatagattgagaaattttctgaggttaaaaagacgctgcaaaggcccctgggagtggctgaggcttgcgtgcgggggcctcactctcactgggccaggcttgaagaccaccctgggtctgtccaccagcctttttcctcctctaggctcctgcccttttcccaggccagaggccagaacaccaaagaagtcggctcataaccaggtgaaaggggtccgtcggccagctcgactccacggccagcttgacatcttggtccctgcaccctcacactgctgtctgggaatggaagaagggcatccccaagcctgagggcatgtttgaagtgaccagaggagggccaggcagggacaccaggggtgcagcaccatcgcaggcgtggcttgtgttctcgcacagctggccagccccgccctgactgtgtccaggcttagcctccaccccaggcatgaaccaatctgcccctcaggcctcccttcctctggcctcagcagagtggggcatgggtgctgggtgaaggtttcccctcacaggtctttccaaagccagaccagggcctagtggcatagcccactgtccctctgtcaccctcaccctaggctatctggatcctttgccactgcaccgccacaggagcagaccccttggctcacctgaagctgcatttgggagcatgacggaaatcatccgggagacaaagcaaatgagttatgagatgctgaggccacaggctgggccagggcaccaggcctctggcagggggagggcgggaaggggtgggtaggcagttttggtcccaagataaagtgcacaagaataagaccttatgataggtaggagcagggtgagcttgaagtgagcttttcaaaagacgacccagacatgccagcacctagttcaggcctagagaccagcacagcgcagcagtcactggcatattcacattatggtgggattggctcaaaaaggcctgcccctccaacaccatggcacccccacactcccgctgttttgtcctccaggcttgtctaacccttctccccctcctcacgggcagcaggtgggctgctcctcaggagagtggcaggcccctcagggcaatgtgctgcagagccagctggtgggcaccagcggctggcagagaggcaacggccatgcccatggaaggcccacctcagcacacttcccctaccctaagatgccaccctgcagcggcctcttcctacacatgaatgttcacctctggcctaagtctcccctgaggtggagaccccgggggagggaggcctggggctgcaggtggaggcttccattctaggtggggtcaggagggggctgcactgaggctggtgcttccccctggtttgggcctttcagatgaggggtcaccctgctcacacccaccccaggctctgcttccctttgtacagcttgctcttccttcctggtctgcaaatgggagggagatgggagccagcagcaaggggcctctgaggctgccagagtgagaggcgacacatgggtatggccccaccatcaggcccaggcatctatgttacctcctcctccagaactgtaaagtgtttggcaaaggtcaactgctcccgggatatggagtcacatacacaaggcaaggccttctgctgaggccaactgcaggtccaaaggggcctgcccccttcccagtccagagtccacactggggacatgcccaggatgaccagcatctgagcaggacaagcaaagacgaggtcttgctggaggagccagtgggaaccccttgatccagtcttctggtttcagacagggagtggaggctgagagaagggaatgaatttgtctgacatctcactgccatttagtgacagagccagggcccactgctcctaggttgatgctgcttctctgataggtgtctaaggagctggcctaggcattctcaggcatgagaccttcctgcttagaaagggatgggatggggcaggcagccttggtggctggagaagctccgcagaaggcagccagcccagtctagccccactctcagccccagaacccagcatccagcctggggcctggaaggaggatcttcccgaagaggccaagtgcaggtccatggttcctgccaagcaccattccttctcggggtttcctgcctggagctggggtcacttcaggggccctgaatcagttagagctccacgaagggggaccctagctccagggtcactggacttcactcagagggactggttctgcagctctggaatggatgtgggctggctacattcagagccagctgcccacagaatcttgcagaggcctccagtgctccctgattccctgggccactgcctgaggaccctagtcatggctagttcatcctgtggggtgcagaccaccttctctcccctccccatgccagcccagggagccatctgggctggccattgtaatatcctaaatttaccagcctggccaccaaaccagcccaactccaggcctaatctggctcgcctccacctgtcctcctgccacttctggtcagctgaaactaaggctcagatttgattctgataaaaaataaaaataaaaaaggaaccaaagtataaaaggattctacttctaccccatgggcactctacaatttttcagcttcacacataattgtgctgagtggagttttgacaaccccacataaggcccagaaatgcacttgattatttttttgtacgaaatgtgttagaactcctcttgcctatgttaaaatgtgaatgggtcagtctccctccactgtaggttgagcactctcccagggggcccaggactgctggggttggcgtgctgctccctgcaggtgcagccgtgagtctacggccctgcccctcagctccccggctgcacagtgctccgtccccaggccgctgaccacactcacaaccccttgttgtacaccactgtccggctgctcgtggcctgggctatctccggctctaattgggatgtttcaatctgtggagagagaacagagaggaaaagtgggggagtgggaaggggcaaatagtggggctgggagctgcagtgaggaccaccctgggccccagagctctgccccctgcacccccgtgtccaccccagccagggctcacatgccctacctagtgacacatcttccttctccaccgccctcccgccgcggggctcacagcatcccttccagcccagaccagatctctttcttctgatggtgtgtccacgtgggtggacatcctacacactggcctctgagttctgcatctccctcacccccaagaaccatgtccactgcactgcagacctaccacagccctgcccagggccattccctggacctgatgaccacccagggctgctccacctcaactccttccatccaaaccccaccctcctgggctcctcagtcgcctgtccttccagcaccccactcactcctgcttctctgtttccagtcccctagacctaagcgcccacactccacactccgaccactcagtctttacatcttcccctgcagtcccgattccaggggccatcccttcagctactccctagcccaagggtccctcccacgctgctggcagaagccctgcttcggagaaccccaccatgcaccccactcctacttgaacctgaccatgtaatggagaccctcaaaattccctgtccttgactttggctggacccccaaccactgcagacaaccaccccacccctgcccccatagccaggtcagctccctcgcccactctccagaggccactggatacctgctctgctctcctctccttggccacccaccccctgctcccacgcatcctgggcaggtgacacttcctcttatttagggaaaaagctgaaggtgtcagaggcgaaaccctcagcttcccatcatcaaacccgctgccttccgtgtccatgcatggctttccacctgccctcctcccaccccacagctgccatccctcccctcgcaggacaggaccccacctggctccacctcccctgcccactccggggccccctcctgggtcatcctccctctctcccacctttgcccgttagtgttccacatgcaggaaccttctctgatgacacctccccttcatcccaaggcaggcccagctactacctggtctctctcctccccagcagccacgtttctttaaaaaacttggtctacactggctgtgtccacctccttccctcccactgacttttcaacccacagtaaatctggcttctgttctcaccacactccagaaaaatctttctctccaaggtcactgccaccccccacttcacgacacccactgcatgctcctcggggtccttggggcttggtctggctgggccctcttctctgcacatgccctgggttacccccacacaagatttctgcagccttgtttctccctggagcctcaggttcacagccgcctgcctgccaaactttgctgtggatgtctcacaggcgcctgaactcaacccacctgaaatggaactgaacctgccctctcccctggccccactcagctctccatctcgggaatgacgccgccatccagtggtgctctgcccaaagactctggagcctctttgcgtcctctccccgtccctccccacaaggtctcatccagcccagtccgtccccaaccacagccagtgccggccttctaaactgcaagtcttcccatgcctctcttcactgtgaaatggctccatggcaccctgatcctcagggatcaagtcagactcccgcgccaccctgctccttggactggagacacagggcacatggactgattttggttcctcgcacaccctgggctctgtccccactccagtctttgcctgagttgttcagagacaccccgtcctacttccattcctgcccctactctgctctcccgtcttcagctcatcatctttcgtgtctcagctttagacaccttccctcccctacgctgggcgtggccacctctgtggcccccatagctccctgaacttctcataccccacctctccacattagatcacaagctccctgaggcagcggacgtgcggatctgtctcgcccctgtgtcctcaaagcctagcacaatgctggtccacagtaggtgctccctcagtgtggaatacatgggcagaaagaaaagagcactggaatagaataggcactggaagacggggttcccctggagacaccacatcagccccgatgttgggctttatctccagggactgagcccgtggggatgcctgagcccctagctagaggggggcaggtgagaaagacactactgcagtgagaaggtccccgccggacatttgccctggacagagtcaaggaggcaccaggcctcttgcaacttaggttggttgaacttggttctagacacccgccatatgtcaagatgtggcaaccctgggaagtgggcagaaggtggtacaggccagcctggccttcggagagctctgtcatgtctgggctgtgcacattggagtccccataagagggagtgtagtgaggactagagctggtgggcacagtgggagaagagaggacccttcctctgtagtcgctggtaccccgttacccaagtctggtcacccgagagggccaaacagaggagagccaggctgagggcccaggcctcttcgccactccgtcttctcaaaccaccttctcccaccccacccctgccacccccagtcccctccaccctgccggctcccctcgtccccacgctgccactgacacaatgcacagcgcccacgcttaaaaatctaaatgcttttgaaaatgtttaacctagttagacaaattagcaaaaatttgtgcaaaacaatttaggtatttaaaatattcaatgtttttaaaaaactggaaaactgttcttagctttcagctgcaaaaaccaacaaaatataacatcccagcaatcttaccatgaggtgtaacataacccttcgggaaagctgttaaacagctactgaggcatcctgggaaatagcacttcatttattcaaatgcacatatgtcaggcttttgcaccatatgtcattccaagctatttacagtaataattaaatcttaatcaacgtttaacctctgtaaaatgtttgaagaatcctaatcacccttcagactgcactaatgaaggagaaatatataaacataaaaggaaaatgatgcatagatatcacgctggaaagaacagtaattgcaaaattgtatttcttttaaatataatcagtaaatgatgtaaagtaagccaaggagtattttaagttaagacatcttggatgtcagaggtgtgagcagctaattttgttctgctacccataacagatgtagcatattttattttagtgccattattagcaacttcccatgccggctttcactgaagcactgaggcccacattaaaatcagagaggctgctcagcaccaccatgcaggaccacggcccagggccacggcccactgtgcccactccctagagcatgctggcccgggggagaccgaggcctcctcctcctggcaccccgtctcccatgggctccccgccacacacagggcagcaggtaggagcagggggagatgcaggcagtgggaaggctcctgggggaggtggctgagggatcaggagcaggggccccaggacagagctgacatcctaggcttcctctctcaagtcaatccaccctcctgtcagcagatgttgatggtcaccaactccagacacccaggctgggcacacagagggggacaagaccaactcatgccctctagaagcttaaagtctagagaggagttggctggtgaatgcagatggagtccagagagacaagcagagtgccatggcaactggggaggggttgggagttccaatgtattgataagggaacaaggaatgaagacttctcagaggtggtgagccaggaagagaatggaggattttgatcagaaagggcaggccaagcttgctgggtgaagaaaaaaatattagctggctagcatggcctgtttctgggaggcggggcaatgttggacttggaaatgtggcaggaaatggaggtgtggctgggacaggcagaatcttgtaggctacatgaaggtgtcagcattttacctgagggcaatagggagccacagaaggactttgagcaggagtggaccataacccagcctctgtttttatttttttcttgggataggatctcgctctgtcacccaggctggagtgcagtagtgtgactgcagctcactgcagcctcaaactcttgcctcagcctcctgagtagctaggactacaggcacatgccaccatgcctggctaatttttaaattattttaaaaatttttacagagacagggtctcgctatgttgtccaggctgatcttgaattcttggcctcaagtgatcctccaccttccaaagtgttgggattacaggcatgagccaccgtgcctggccttagactgtcttagaaaggtctctcttgggatggtgggtgtggaggatggactggaggggtaaggagggggtggggaggcctcctggggagcatctgtgggaatcagagaagtgccaggtcctgccctatgatgctgccagtgggggaagacaggaggagcctttctgaagatgaaatccacaggagttgatgaccaattccacgtgggggtgagagggaggtgttgaggatgactgtgcgttggatgactcctaattctagctcaggagctggggtggctggtgacgccattctcggagggaatatgggaggggatgggccagggttgggggtggtaggctcaggatggccacatggagtctggggtgccagtgggttccccaggtggacaggcctgggaggcagatgggtccagggctctggagctctgggcaggagaaagcgcccgggatgtgtgagcatagccagatccttcagagtggaggagctcgcccagggaagcagatggaggggtgggtgccaaggcctggggaacaggcacatttgaagggcaagcggagggaacaagcctgtgatggtggccttgggggaccagcccgaggagcgaacgtaatgacagagggtgccacaaacactgagcagccatgagcgtcagagagagttttctgagagttgtcccagtgagggctgagaggctttggtcttggcaactggatttcagtgactgcctggggtccacattgtccgacccccacctcatgctgatcctggttcatagcctctcactctatcccaggccaacttaactggtcatttgttaggacccctccagctctctggccatggccaggtgttgggtcagtggccaccatctctaggtctcatgggtattgggaccactggggtactccctgctgggcttggctaggggaggctggggcaggaacccctgagttgcctgctcacctatatgtgatgtttcctcccctgtccaccaaaaactaagcatctcccttgaagaccacctctctgaggtaagtgtggggccaagttttctccaagggaaccacatctagggccttgcctggcagtggcctctggacccatggataagtgaaagtgactcaggtctgagcaaaggcaataaagcatctcttcctgctgcccaaccaactccaccccgcagaaggccagagccccagggcagtgggtcgaggggcagggacttggctgtgaccacagactggctctgaggggccttctccggggataaggggatgaggagagaggacaaggagtggccatagggagaaggggtggcccaggcccaggcagccagctcggggcgggctggaatccgtgggcccatcatctcttccatctggtaggctcctccccgggcacccaagagccagtcaacaggggctcccgagggagggggtgtctgggatggaaagccaaagccctggagggcaggggctgcagggaccagggagcactgcctgatggtcgcccccgccacagaagtgggctgccaggatcaccctgccctgccatgaaggaagcagtgccgccctgctagcgctccctgactcccaggcagaacctgcacaccagctcccagccagcctcctcgggatgtgcccctctccgtatcagagtgccaccccatcttcccaaccccgctcagaccttgctgcccctccaggagatatccccagacatggagcatcctatccagcgtctccccagcctcccgggcaccctaaggcccagctagaatagccaagcaccttcccttgtggtgtgggaagggttaaccttgagctatttgtctctgtctcctgcctcactgtgggtggggggctagagtcaggaatgcatttggggccacctctgcctctacagcctgggagcacacacacacctgcagccaggccagcagatagtttacatatttgaacctggagctaaggtgcggagacataaacaggaaactggatcccctgcctgtgccccattcttgggggcttttacctactacaaagaacttcctcctgctggcctttcttctgatggcttttctgcctccttttcaaaggcatggggctgggggggtggggtgttcggtgtgaccctgtgacatagctcaaagccaccacctgctcctgggcagaggtctgggcttctgagggtctgcagaaggtggcgacattgacgcagggcccaaagcccaagcaggcacctggctgaccctgtgtgcctgaggcctctgccaggcctgggaccgctttgtccactgggcacaacatcccatcctttctcaccagggctgggcaggccccatgtcctgttccgacacacacacatccaggccccacctttgggagagctatcttgagtgtctttggagagcagaggcattaggctggggctggggagcagttgaggcctaagcctagacccctggacccctgagttaggcctctggtgctggctctgggctcccactaccttctcagtgaaagaaccctcagctggacactccaggccttctgggactttttccagcttcttcacccatcaactgctgtccattttctgtacattctaagtatacgctttgagtcctaagtccaggctatatcctgaccctctaaggctgcctcctccaggaagcctcccttgatattcttagaccaaatccattgctgctgcctctgtgtccccagcacatgcttttatctccatcccatccccaggcacaggctcatttgcactctaaacaggggtgactacagtagtcccctgccccaccccactgtgagccgctccaggcagctcggtatccctatgccttgtgcacagtaggtcctcagtaacagctgagttaagtgacactgaagtgcctcgtgggcaagaatcctgtcttacacttttccggctcccctgtgctatgtgttcccagcaagtgctcagaccacaccccgccccctaccattttggagctttgcaccattcctgggtgccctctggtggaccaatctcagaatcattctctgtcctctgtcttctaagctttgaggcctcagtttccccacatgtatgatgggaagattttctaagatctcctggtgccacgaggattatatcacaaaatggataggatggccctttggaggcttagaaaacctgcgtgatgctgtgtaaagaggacagcacccagggtccccacactcagccccagccccactcactaagctcacagggctgagccttgctgcaggccaggcatgttccactttgcatgtattaatgcctttaatggaagctctgcacaaccaagccttctccctccctatcctggattcagctaggtgtcctggaaggtcctggaaaaaagaactgtgggggaaaggctgtcaggcagccccgccgaggcctgccacccgggcatgtgtacatgttcttgcgtgcacgtgtatgtgtgcgagcctgtgtgcacgcgcaggtttggggtgggggtgtggggaacaggcaaaatgacaggtggcgttggcgttcctgggctctgagcggctttgccattcccatccatccctcctggggggtcctgtgggcaaactccaagaaagcagcgggcggggaggcagcagatttctgacggcaaaaatagcccactttagagttcagtagggactgattaaaccagtaaatgagaaaaaccccaaacaaacatctccaagcaaagtaggagatggatttgagactggagggaaggaggcccctgctctgggagacgctgaatgctgctgtagactcaggagggatgcaatgtgccctagacattgtctctggcctcgcatcaaccctggaagagtgggagaagcagggaccaacaaagtcaaggtgaacccagatgagccacgctctgtactaggtgttgataaagggcaccagttctctgccacagggacaccttgtgtcatggaagggagaaaggtctactgtcctaagggggaagatggaacacagaaaacacaccaccagagcctacacaggtgaggtgagacagatcttagtggggaagatcagggaggacttcctggaggaggagccatttctagaccagcttgaatgtggactcacattccagcttattcccagctcttctccattcttggttgggggtcccaatactttctcaaagaaagataagctggggggactttgcttctggtggctcacagctgtttagccaggctggttcatcaaaaccaccattttcatcagggctggtaagagggtagagatagtggaggttctggtacccactgagggtacccacatttttgcccatacagggagggtatgcctctctgtttcttaaccctgaaagctgtaagtggggaggcaggaaggagtatggggtggctgaggttggccttcctgcctcgtctaccacatgggtgtggcctgtaagagccaccctctgaggccaggacgagacaaggctcataacgggctgaggacatcgggggaaggctttagacttcctcagaacatggcttctaatccccagaaccctctagagctgaggtgagtaggggctcagctgagagggagggacatggggagttcccagggctgacatgggaggctcagggcaggaagccctggccctgggagactcttaggctgtcttttcttctagttgaggtgcttggcaaaagctagaaggggcaggaacaggtggtgggggtaccgggggaggtcagttctctgctgaggcttcagggaaggcagacggcagatgccaacaaaccaacaagacagccaggagggaacaggcccacaggaaacaagcctcctggccagtgaacctcactcctgcccccaggggcccctgcaacagctgaggcagggaagagacacacgctcatagccgccagcccctacaagggcgccccagggccctctcccctgcccgcagccccagccaggaagcacactacccaatctctcatccccaccccagcccccacagctgcagggaggacaaaggagccagtgagggtctaggggccataagacacgttcccaggaaggctaaggccctgcccacttgccgtgcccagacatggctcccagagggtggctcccagagggcacacccttgctgcaggccgggcacctgaggggcagcatgtaactcaagtggactcactcagtccactgtctagcaccagggccctgtcttgagttttcacttccctaatcctactgggagaaacttggttcttacaggaagaaacttagttccaacacctcatcttccagctggggaaactgaggtctttgaggttaagacccaaggtcatatggagagttgaggtagagggatgccagccagaggggcagagggcaggccttggggccacgggacagcccctccaccccaacatcacctagggatgggttcgagctcccggctgcccccctgctccccgtacctcactcatccacagacaagccccaccttctgtggacacatttcaacctcaccaaatcagctaattattgacagttggtgaagaggagatttcactttttcctcctgttaaactgctcctaattagttccctgtcaccacggctggctcgctcgcccgcccgccgcccgcccgttcacgcagtaatcccgctgcacagtgcctcattaaccttttgctcctctcctgccgcctgccaacaagatgaagacaaaaacagattgttgaacaatggctccggcttgtatgtgcagccccgttccccagcccccgagctcccaggggaagagtgaggaaaagagaggggactgcggtgggggagagcccgagaggaatcaaggaagggagaaagaggcacaaagaaagattgaagcagaaacagaggcagggatgtggggaggggccttggccaaggtactgcttcttgctccagagagacatgaggttcattaaacaggattggaagtgctcccaggtagggaacaccggctgtcagagttagagggacatttgccaccacccactacagcctcttgtggtagccaagcccgtgttcctggacactggaccctgcacatctccctcagggaacctgaggccccagtgtatgtctgtgttgcagtggggaggacacagaggaccccatttgcctggaatccagagccccaatcaccaaagggggcaaggccagaaaggccaccacaatctggccctaccacaagggaggcacccagcaccagccccacctatagcggccccggcaagctgccgcgcagcctctgctttaggtccatcatgacctgtgctgtcacctgacagttcttgtttattgagttttgtctccaccaccagcggggagattcactgagaccacaggggtcctacgtggccatcctggtaacaagaaaaatgggaaagtgcccaggctccatggggcagagagcagattctgggtgtgatgggcccatccatgtttggggacaggctggtggggcaggcctacagcagtaacctccagatccaccagatccgccagggcagaccctgtactccctgcatgggcaagaggactggggtccagaagggagcccaggacctgttccccagttctcacgacatgaggttccctgccctacctgttggccctttagcctccctccagcccctccactgcccagccccttcctcagctctgggttggaaaagacataaacactgattccaaaaggtccctgtgaaaacgcagatttcctgtggaggggaggagggctgggtgagggcactgggatgttcctgctgataaattagtagcaagcaatttggagcccagaagtgggcctcctctttctatagtgaggtgtgggtgggctggggagggtcacagaattcttctgcctgggtacaaagcctgctccatcgtcaacaactttggatcttggacaacgtacttaaccttaatgtgcctcagtttcctcattggtaaacaaggaatattgatacctaccttggagaattctcaggatccaggcccccatttctccaccacagccaggtagccccctctactcactggacccagggactccatagaggccatgccttcccgccttgggctctgggcattccttccccatcattgccctctctccaagccccccaacctccatctcacagtttctttgctgttctcccacagttccccatctttgagctcaatcatctgaacaaagaagaaactgaataccatgttgcctcctagactgccatgtctagctatgccacctaagtctcctccactcctagtcccctctgcactcacccactctggagacagcccctcctctttgaatcgcccaagtcctcagcttccatgaagttactccatctgggttctccctgtgcccttggctgcttcttccccttcttgatggtttttcttcctcctatagtggaccacatcccctttctcagcttcaactcccccccatacactgaaggttccgtatctccagccaaactctctccccagagccatctgactgtctaggaatcatctcttgatgttcaatgttttagacttaaggggcattaggaagacttaatacagtaaggtacaccgagctcccagcatgctgcctggtccaatagatatctggcaaatggtagccattattattatttgcagtttgaccctcagtaccattttaataagcagaactactaatttgaaaagagcagataaaactctcccccaggaactgaaggaaggattgaagtccttgcctcaatctctggggttagtgagttggaaactccacaacaatcactgcaggccagccactctaggaactagttcctaaattctacctccgagtcccctgattagttaattggtgttccagtgattacttctgttgacaaccttggtggcttttggcaaggctgggtcagcccaagcaagtccagacttattgtggcaaatcccactggcttctgggatgtgagacatgatccctgtatggcagaagaagcaccttgttagggagaattaattgggagagtgaatgcggaaacaaggccctctcggcaagttggctgaaggctttggtgccatgggtcccaaacagggctcaaaacaccccataatgcccaggctagcctgcatcttgttgggatccacatagctgaggagggagctctgaaaatcatgcctgtaccctcccttcccagaggaacaaagacttaacatgcaatgactatcttcttcccaatctagagaaagaggcttggattgcaataagagggactttggttaaatatgcagaagaactaactcccatgtctatttgaagtaggcatgtggggagaggggagcctgggctttgacctgcagcagctgtgagaccagggtggctcactttccatcattgctttgcagccagagctggaggcctgggtgggtgaatggtaggcatctccccattatatgccccagaggaacacctgccaaagacctacagctcttctagaccgtttcctaccacccaccacagtgcagcccccagctccctcttctcttggctgtcccaaggtaggtaaggtggttgactagggagagaaactcagccacaggaaatgatcaggtgtagcacttcctaggggcctggacttggagtgtggacctctggtgtttcctctcctatcggcacctgacttctgcaaccttgggctggtcccatggcttttctgggccaccatttccccagcaaagtcagtagcaaggtaaactggatgaccttgaaaatccttctaactgggagggtctctgattctgcatcagtattttctttgccctgggtcccttctctgtgcaggcaggtggagttatgacagctactagaagcacagaggtacctataaacacatgggtgactctggccctggcctaggaccctgggctcaggctgattgcacagacagatgcaatggcttcagggagtgctgggctgggacagggatgtcagagaccactgagaaatacccgccttccctcttcagggctactaggcaacccagagcccatggctccatttggagtcccaggctgcaggtttcccagggtgagaggtgggggaaggagcatcccagcacccatgacaaggctggccgctgtgggcatgagatgaggtcctgctagctttaatcttggtgtgcgttgaatggtgtcccccaagacaggagccccactcccacagagtctcctcctcaaactctggggctctggaaggaagccaccccatttctcaccttccagggcctaaggcgggtcaccccctcctcctgctctaagagcctgggtctccagccctcgcagccccaacagccccggcctcttgttttcacttccccgacttgtctccaggagccctcacctctcctccacctctcttggggccctgcctgaagcaggtccatggtgaaatcacagattcagaagcgccgctttctggccacagccctcgccttcttgtgagctcaatgcagacacctcctgggccctcttgggtctgtgccttcccctcagcttagctcccaccttcactccaacccagcgtggatcccgtggtcctctgctcctccgtgctgtcacccatctctcagcccccctcacccccaacctgacaaaaccccagaagaaaggatctgtggccctccctgtactggcccatagcacctcctggtgaacaggcccggctgcactcccagaccacgtgctgctcagcctcctcacctctcattctcccctggatgtctcaccccttctctgtgtcctcagacctctgacttcctgccccttccccaccctactctctcctgtctgctcagtcacaagaacacaggagccattggaacaacttcttcaattttcctacccctgaaccctacccccagcagcattttcctcccaccccactcctcttccacctactgaagtggggaggggtctccccgtgccaaggctgatcccctcgtctgtgctctggtcccccctcctcttcatagactttcccaaaatcgtcctgtcagcgtcctcgacatctctcctggtgccttctctactgcatttacgcaagcccctgtctctcccatttaaaacaaggacaaatacataaataaaagcccctcctgatcccacatcttgttgcggctgtggacctgtctttctcattttttcccctcacctgtcacctggatcccttctctggggacagggtttggctacgttgcctgagacactaatggatactctgtaatctcatggagtgtgacctctcaggagggtctgaccctgtggatgccccccacccaccctgatcacacatggcccggatctgccctcaccaccctggctgcttgtctttggaccccgccagggtggaggcctcacccaccaccctcgattccagcactgttgtcatgctggtaggctctacttctatccctccagcccaggcgtctctcctcattccagacccagagccaacatcccacaggctcctcaaccccgcgtgtccatccaactgacccactgccctccctcgaacctgcccccgcctggctccatctcattaagcacctacatctgcctggttgttcaaaaccagaaagccagtgcacatcctctggctcccgttccctcccaccacatacagctcttcatcgaatcccgaagaagccgcctcctgactccctctttagggacccacttctctccatgcccactgccaacagcctggtccaagccgccatcaccgcttgctggatgcccgccacaggctcctgatggttccttctctggagctctaacccagccccacgcggcagcacaggggccgctcagaatcaggcatctgtggtctgccctgcacagcccttaggaggacattcaccctctctgttctggcttccaagttcccaacaccacccagcccagcccctcattcccaggccacatcaccttgctgcactccctggttgcgctgcagactttggtcagctcttggacatggcgtgtgctgcctcacctctcagaaccttcacaccaggtgtccgcggacctcacatctccccccgccaccccttttcatctggccaactccagccacgctcccagtcccagtgaaatgtcacttccctctaggctcagtttggtctgctgtctccttccacacccagtggagcttctcccaccctaacgctcctggctcctcatctgctggcctctgtttaatcaccctgttgactgcgtgaccctcactctgagggccagagcctgggccagcctcattcacggttccagccccagcgcctagcatggcgctaaggagtcggcacggtatgagtatttgttcagaaatcaccaaacagcaccccctgccctgccctgcccttgagcccctccccactgacctctgacatttgcgggaagaggctgatggccagcggcagggccaggccgaaggctgccaggcacacgaggctttgcacagggaggagcagccgggggcgtgcctgcaggagagccgtcctgtgagggagagaggagggagccccatgagacccgaaggtggggtgggctggctgccagccaccatgctgggtcccactctgtctctgggcccaggaagcgtggttccggggcagtgccagtgtgcagctaaacagatatagcagagttctgtctttgggaccttttcccgataggtacccctatcccagcgggtatagacccctatcccaatgtcttgaaggacgttgctggctgaaacctcaattactcaggtcacgaatgagtactttcggggcacccacccgccacgcgtccagccccgtgccaagaaggccctatgtgggagagacactcaaagaggctgtcggcccctgttcctggggagacacatagggacgtaagatcgctctcgagggcagcacgtaattaaacagcaaagaaaccagagtaggtgccaagttcaggggagatgacaaagcacatacatatgggcacacgccagccaggagggggtgatcctcctctatgtgtgagaacagaagacaccccactggccaccttgtcaatttcaacccaagggcaacagagggtgcaatgactcgtccaaggccaagtctgcaggaggctgtcagagctgctgcctggacccctggctccccgagggtgctgtcaccccagctggtcccctgtgccagcttcatcaccaacacaacacagctggcaccctcttcccatggctggcttcggagctggtttcctgggcaggggagggggcatgataaacctccctttggggcccaggctccccagacagcgtggggacataccagctggccaatgtgcctgcactgtgttcatcggagcttcctgttttgctcaatacagcaggcccttcagcggggaccacagcattccacctggggaggcctgggatgactagactatttgccagggggtgttgggcaggcactaaatctgacctcagtaactgttagcctccaagtgacaggctcctggtgtgaaggggaaataatccaggctcttatccgccgcccccagcagggctgaccatgccacaggcaggtaaggggccctcctaggggcagagccccaatgtggcgggcagtaaaccccatatactgtcacctcttgagacaagaatcccaacagcaactggccctgagaagacagcaaaattgggagtagttttcaaaagttaaagtgcatcagctggactgggcaactggttaaaaatgcaaatgcccaagggttgcttacaaccatgaaagcctgattcagtgggcactggacctggaaatgtgcattttaaccctccatgagtctaaaatggtgatcccagaccacacttctgataaaccctggccctggatgttcctgctcaggtattaataaagatcccattacttgcaaatcctatgcaagtaaaagggtgagccctggcctggcacacagtaagtgctcagaaattatgtgtcattattgctgttgttattgctcatgttacctgcgggaaggtaggatcctggtagcccacctgtcttccagtccttcccacaggcccagaccgcaaggtttgtccagctgctaaatccggcctgaattaagctattggaaaggggagtttccacaggattgagcagtaggaccaaggtgcctaaatcaagcccaaacccctctgatcctccaatccccatccagcacccccaccctctctctctactccatgctagcccatgcccgcctggacttccttaggggtcgtggaggggctgggagtaaggctgagagggccctgagatgaacttctcaagcaagatgaggagcgggggatacaaggctcattctccaagcttcatacagagtctggaggccctgcttggaggaggctgtggaaggacggggctgccctcctgttccagtggcagtgactagagggtgtggagtccctggaagcacagccccgagggtccctgcccacagccctgagagcagtgaagggtgagaaaaagaaagagagacgctacccccggcaagtgaagagcaggccatgggctcagtccttgggacctgctggtggggacactagacagaccccctttctgtggggctgtgaccaaggctcctctctcagggtggctggctgaagtactcagtgggaaagaggtccaagaagtctgaggcctgggctcccagctcaggaaggagtcaggcctgaggctgaaacaggagcctcggaagccccagcccagagcaggcctgagagcgaacacagtaggacagggggaagggaggggggaggaaaatggcaaggagggaagggaaaggcagctgggggagttaaaatatgtagatggagagatgtgcgaatgcctgggagaaaggaaagacctggagcccagggagtaaaggaagctgggggagcggactcagggctgtggcctgggcccggagccaactcagacccagcctggtgcccctgctggcccttcattccagtgccagggaggctgggctggggctgagccagctagagccctcctgatccagcacaggaacctgtgatcccacccctgggcctagcttcctcctcagcatggttggtgctgcagggagggtgtcaagtgtgaacccctggagcattcaggggagctggagggtggtggagagggaaggatggcacccagtggactgcaccccccagaggcagcccagtgcgctggactggggatggacgctcctctgcttctgacttgagattcttttcctttccgtctcagagtcaaggccaactgagcatgctgagctcccacctttctcttcccagtaggaagcccagggaccttggctctgaaagtatcaaccgaggccagaggcgaagcaaggcaggtcccagccatggccgccacaccacagcttgtccccctcattgctgtgcattccttcagcacttggagcgcagttttagtttgcactccgttaatttgtaagtgttcttttgtcttttttccttggctgtcctgactccctcacccaacaggggctccccaagggtgggggctgccttccttgtcagcctcctcagcggaagccctgcactagtgcccctgcacccaaaggctatagggtgcgtggcacggaccctgcaaagagcaaaagagctgctggatggtgcaaaatgcaaagccccaacaaacaaggtgatgaaggggcagtgtcctcattttccaggtgggaaactgaggctgagggaggctccacagccacatcagactggcagaaagaggtggagcaggaacctagattttgttttcctaccagagcctcagctcactctgctacactgccctgcctccctaccacacagtcctgcacttccagagtacatgtgagattagcaagccttcaaggcacaaactgggtcttattcatcttcatcttcctgggggaacccgggctgaacttttcttctccccagggaccctccaaagaacttcagggaaggaccagtgaaacatgaggctgccaggagcaccaaactctgacctctcatcaccttatcagaggggctcctttggagcctgagatgtgagagtatgtggcacccagacactaggcaggtcccaggctggacgggttcagtcccagaataatcaacccacttgccatggatacggaaggggggaagggaagggcacggtctctggctagggctccacccccaggcctgtgcccacggacctaagtgaggacaggcatttttgttttcctgcccaaatgttgcatttcccaagaccaccctggcctgccacaccccctgatcctgtacctaaaaatccctgagaccctagcaggcaaacacacaggcagctggacatccagaggagcacatcagtggaggaacacacaagcggctggacagcaagaggacgttgaggggagcacgctggcggaagggcacattgacagacgccggcaggccacccacgggcagaatgatgcggagtttggctggggcagtcggaggagagcctgggccaccaagcagcccgactccagaggaaaaccaatctcccttctggctcccctatctgctgagagctacttccactcaatgaaaccttgcactcattctccaagcccacgtgtgatccgattcttccagtacaccaaggcaagaaccccgggatacagaaagccctctgtcctcgcgataaggcaggggtctaactgagctgactaatacaagccacctatggatggctaaactaaaaaagtaccctgtaacatacacccactggggcatcagctataaacattcacccctagacactgccgtggggtcggagccccacagcctgcccatctgtatgctcccctagaggtttgagcggcagagcccggaagaagcaagccacatccccatcgcactccctttgagggggacaaggaaacttttcctgtttcaccatgactcccaaagccaagtttaagcccccaagttaatgggacactaaccatcattccactttctgcaaacatctctgccaactgggaaggcatcacagagcatgtttttccccagcaaattcttgcaggacaggtccctggatgagcatggctgacccagcttcacaccccgccccccgccttcttgtagttctcaggatagctgtaggatgtgttgggaatgcaacatcttgagataaggagggcctgtctgagacagcctgggctcatgttcctacctcttctggaacaggatgtcctgcaacactttagcacagtaagctgatgtcccccagggtggaaaccccagggtggagcgctcccaggctccctcagttgcagtgtgatgtggtacgtgggtggacgagactccatcctccctgggcagctttctcgagccatggggcaccagcttgccttgagtggtaggcgtccattgtccccgaggcctatctgtgagtaataaagttgcttcgcttgacttgtgcgagtgttctacctcactggacttgtggtacaagtaacagagtaagcactgctcactgaaccagcttcagaattccaaggttcaagactcagcaatctcaaggacagaagaaccaccttcctcacctgccccgcttgctccctgtgtgtacttgcagtcactggtattcagggacaacctcagttcacgaaggggctacgtatacgagagtcaggggcacaaaagagcctgccctgtttatttttgtctgttgcaaacttccataccatacgcattttcttaatcccagtgctcaccatgccatgcccatgctcaggtacccccagagcctccgccctcttctagggtgagagagggctcacctcagctgggcacacaggacccctcatcagctggacccatgagcgcacttcactttgaccaggctggacacctcagtgtctataccacaggcctgcaccctgcccagaaagcccgcctttccacaaaaattctatcctgctctctgggtcggccgcagcccctctctgggtaccagcccttcttgctgccaggcccacagtgcttcctcttctcaaggtcaccttggccaagttcacacactgcctgctctcacctgcagctgacctgggtacgggtcttgcccaccacccttataaacacacaggcttcctgagatcagaccccaaatctactcttcccatttccacacagggcaggactcaaacacaggctgattgagggttatgacctgaatatgcaagaggcagccagtgtagcttgaagagactaagctttgcagccgcactcctgagccaccgctggctctgctatttcctagtacatgaccgtaagtggatgacatagcctgtctttgccttcctctcctcagctgtagaatgaggatattatacttaccttattatgctgtcctgaaggtgaaatgagagaatgcattcactcactcattcatcctttcaacaaacacttactgagcatctattgtgtggcaggaactgtgctagatgctgggcagggcagtgaacaaaaggatggacgtgcctcatggagatgacattctagtagagcagacagaaagtacacaactagaggaacaatctcagatatggataagggccgtaagaaaaataaaggacttcaagggagaggaaataatgagaaatggtgaattctgatggggtggtcagggagggcctctttgagggggtggcattcgggcagaggcctgactgagagaggactgggatacacaagtgcttaataaatgtcgcttgttattataattcatactgcgggaataagaaagtccccaaacagggaagaatcctttgccccagaaccccagatggagtaaccccatccctgtccttataccacacgcccccaattccagctgctgtcttgaggtgtccccatagggtagggtctcctcactgtcaactgacaagccaggggtctgtaactccaggccccctccacctaggggaccctcccctgccccctgccttctcccagggcccgccctctctgcgcagcctttccttccagcggagtttcagtccgccccttcagtttcgcactcattcattaatagaatcactccactactgttactatgctccctcatttcttcacagtcatgacagatatgagtgcttagaacatccctctgagggaggcaggaggctattactatttgtattttacgagcagagaaactgaggctcagtaaggtggtgatttgccccacagcagatgcctacccaaatctagtcttcctacctgaatcctcagactctgccttcacaaatggtcctgtacatactattcactgagagcatgtgagcacacatgaaaacacacacacacacacacacacacacacacacacacacacacacacaactgccagctcctcaggggagggccagcactgttatcctggtatccctcgtggcacctagcccagggtcctgcatagtaaaagtccaagaattctcacagagtgattctgtggcactacctggaaagtccaagatggagcaagacaccttccaccctctacacaaactggggtgggcttcctgccaccccctcatctcttgcctgggccagccggttccccctccctctccccctcctcccccatggtggcctctccatcctggctgccccaactcacttctccagcatggacatgacgatcgggggtagcaccaggatgggcatgggcaggaccactcgcgtcagcgccgtctccagcagggcctgaggggcaggcagaagctgtgtgagaggggcctgacagctggtgacaggacagcacaccacccagagccctaggtgtgtgccaccacaacgcatgtgtgtctgaatggccttattcatgggattgctcaggaagctgcattccaaacaacaaaaaaagccactggtctcctttttccttccttccttccttcctccttccctccctccctctttctttccttccttttttctttcctctctctttctttctttcctctctctctctttctttctttcttttttttgagacagagtcttgctctgtcccccaggctggagtgcagtggtgtgatctcagctcacttcaacctctgcctcccaggttcaaatgattctcctgtctcagcctcccgagtagctgggattacaggtgcgcaccaccatacctggctaatttttgtatttttagtagggatgggatggggtttcgccatgttggccaggctggtctcgaactcctgacctcaggtgatccgcccgcctcagcatcccaaagtactgggattacaggtgtgaaccaccgtgcctggcttccagtgttcttcttaccacacacatttgagaagagcagattcccatcacctgccacacgtggggaacactcaggcagccccaggaaggggcagtgctcagggaggtggctgactacctcgggggtggtgggcacaacctcccatactcagtgtgcacaggggctggggagcagctctaaaagcaaggccagcatagtcagctagggcctgttgagccagtggggctcatggagccaaaggaggaccgagcttctggaatttacttttttttgttgttggtgttttttttgtttgtttgttttttagatggaggtcttgctctgttgcccaggctggagtgcagtggcatgatctcagctcactgcaacctccacctcctgggttcaagcaattctccagcctcagcctctcgagtagctgggattacaggcatgccccaccacacccagctaatttttgcattttttagtagagatggggttttgccatgttggccaggctggtctcaaactcctgacgtcaggtgatccacccccctcagcctccaaaatgctgggattacaggtgtgagacaccgtgcccggcctactttttttttttttttttaacatctcttaaagacaaagatttgcaagatcttgtgtctcttggctctggatgagtctttctcagtgacaagaagttggttctgtaagggaagcatgcttcagctgggtgtctgcagggtttccctcggggtctgcttggggccttgctccagggcctcccaagggattcctggggtgggagtgtccttgccagaacacagctcagtggcaattctgagctccgacagccactgtggtaagttcctttagccccacgagcttcagccctcagaggaggctccaggagcagctcacagcccacagatgcctggagtccttccccggacagcaaagacctaagcaagccaggctgaaggaagccaggggccacttgggtttccttgctgtgtgacactgacaggagttatcatggcatggctgtcctccctcaggggggctggggaaaagaacagggctggaatgggaggttggggacaggtaggaaactgagactaaatcccctctcatgatgggctcagggctgaacatttctcccaggaacctgggctcttcatggtcagcctcaggaaggcctgggagaggcccctccagtctctggaacaggtatgggaatgacaggagggtccagtgccagtgcagggagcagaggatgcaatgtcggcatgacacccccagccccttgccctaaaaaccttggaggggcactgacttggagagagctcttcccagactaaagtctgattgagaagacctcatgactggggtaaggcttgggggccctggtgggagctgataaggacagtggctggagcagggatgcatgctccactacttcacggctcccccctagcacccatcctaccccatgcccagcacagaggccagagaccagggggcagcaagacgagccactaaccaccatcaggacaaaggctgggaaagcagagggagatgtacacatggactcatggactgcgttttttttttttgagacggagtttcgctgtttcacccaggctggagtgcagtgatgtgatctcggctcactgcaacttctaccccccgggttcaagcaattctcctgcctatgcctcctgagtagctgggattttaggtgcccgccaccacgcctggctaatttttgcatttttagtagagacggggttttgccatgttggccaggctggtctcgaactcctgaactcaggcgatccacccactttggcctcccaaagtgctagaattacaggcgtgagctactgtgaccagcctgtgttttcattttttaaactgcaattgctagagtggctgagcctatgaaaccagtggcgaaagaaggtcttgtaacaaaatattctccaaacctctgcaagcctcaaatcccttgacctcacggcactcactccctggtgagctctcacctgcagaagtgcctattaacccagaaccacaaaccactggcctcccaggcttcctcggcttacccaagaggatgtgaaggcccgggaggtagggcccgggcagaggcaaggggaagagagctctgagggagtctcctctgccctcaccaattaacacctcctctgggtgagacaagcaagaagctgggtcctgaggggctgcgataagagacaggaacttttcacagcagtgagaccatgtccaggggaacatgcgggaggccagaggcccagactcatgcagattggaggtgggggtggggtgaggaggagacatcaagatgccaaaataagggtaccctggatagaagcctgtggaagacacacgctaaaggaaaaccactcccctcccctgttgctggcctccccaaccctgcgaacccccagacccacgtgtcgggctgcgatcttggaggagcccacgaggttgccatcgctgtccaggacatcaatcccttcctccagctccccgtaccgcatcaggaccacattgcagatattggcactggctgcagagagaggggatgcagagagcaggatgaggaggaagatggcattccacctggagggaggtcactacactccttcctacgcaagccttggggttctgtgttcaaatgcatgggcaaaggttagggaaggggtggttctgttgtccatctgcctatcagcctggtgagggatctgggggcccttgggaacctggtaagtgaaagtggaaaagaacaggtatcagggaggacacccgttctggcctcagagagcggccacttaccgaggggctgctttcctctcctccagggcaagcccactaggcaggcaaagtgggtgtccatctgggagggctctctgacctgaagtcgcatcccccctgaccccgaggcctgatgttccaccatcactggggcccttgcgctgccctatcctcttaaactgtcggtccaacatccagcccctcctgtctctgagcaaatcaagttcccagaaatttgcctccctgacagcaggtgccagagaggcagaaacctcagtgttcacccagcaccaccccctcatcatatggatggaagactgaggctcagagaagaggagtgacttatctgaggtcacacagcagagtgggacagagcagaaaggctacagtgcctctgcctctgaatactcagggggcaagagggttggggcaggagcagcgggctgagttaagggcagaccttctccattcttgcttcctatggctgagtgcctgcctttggctaggcccctctgccatctgagatcttgggaacctgggctaaggggagggttcccggctccttagtgaagcactggttgttgaagtctggggccacccattagctggcaactagctcagggatcctctttctgctcccccatcctgggactcacatgactgggccaggccccgtggcccagtgcagtgtgggtgttgaccccgcctgaactctcccagccccgctgcaggatggaagtggggggacctgggaggggtgggcaggtggggagtggggggtgacaaatgcagagtctgcctgcttcactcctccccccaaagcgccttgctgtgtttaaagttttaatttttgctaattaatgtcaattaattttgtataatgagtgtttaattttggggagtgtgtgagcctgggagcgactgcagttctgggctgtgaacgctgattagcatcaacacctgctgcttccccctccttccagtggggggggccaccagggtttggggagctggagggtggcggggcctagtgggcaggcggagtgggagggagaccacagatgctcctggggcctgagccaacgagtggtccagggtgctcacagctggggcacagggttctgtgggtgaggtgtggcttgagacccctggggcctcagtcgcctgtttcattaaaatggggaggtggaataaacaggggaagaccgagagactctgcagtctttggagaagaaaagcaggaggccaaatacagttctaaaatgtatttagagcacacacaccatcttcgagcatctctcctgcttccaccgacgctcagtgcagtggaaaccatgggcagtccctctgtgtcccgggctctcctgccccacaacaggcatgctcacctgccctaaacagccgctctctgccaggggcggttctgtggggcatttggccatgtttgagggcattttcagtgattgtgatctaggggtcaggggttgctgcaggcatctggtggatagaggccagaggtgctgctaaacatctcgcaaggcacaggacagtccccccaccaaaggatcatctggcccccaaatatgtcaacattgctgacactgagaaacccttgttttcaccacagtcagtgacagacagaattaggaagctgaatccaaggtaaaggagatctggttagcagggcatgaccaggaggggatgggagcctgggtttggggccatcgggcttgggttccaattctggctccatatctctcccgcctcagccccaggcgcccagggctcagggcccagaagggtcccccagggtagccttgggaagcagccacctggcctctgtgttagtgacatgccctctagtggccttagggaggctatgcatcccccatgcccttggagctgccaggctttcggttcccaggagacctaagaaaaccgttgagaggacagtggggttttctgccctgaaaggcatcaatcctagccctctgatgacgctgtccaccataccaccaccaccgccactcccagaaaggcaaagttacaggaatgtggtccaggagacgagcatcctgctaaagtcaggagctaccagctcactctggggacttgagccattgccacccaaccccaccttggcttctccgggcataaaaggaggggcagaatgtagggtctccatgggatttctgggtgctggctgagctcacacaaaatgtcagcctctgcacctgtgcccatgccaagtcaggggaaagtggggacagctgaaatgtctccagcccccattttgtgtgtgtatgcataggggagacaaacagaagagagagtgtggatctggaggtggtagtggaccagccctgactcacggtggcatctcactctctccctgtaatctccaaacattaaacatgcggcgagcaggacagctttggttcaaacacaaaaccactgagatgaaagatgaagcatgaaaggaagtgaaaacccagcctccttcccctcatccagcccctccaggacaattctgaagctgcctgaatggaaaaaaaacagagaaaaccctaaaagtcatctcagaatgatggtacctgccccctccccaggctcctcccttgaaaccggcaattcttacagcctacacagatggcacatgacctgcaatctcttctgttgactgtgtacattggttggcctttattgagcacctgccgtatgcagaggctaccagccatccatgcccttgggcagtgggaatgccagcctgttacagtgatttcatttccatgagctcatcccaaactttcaattctgccatatccttttcaaactgtccctgatccttcccatcccactcctggcaagtccggctcctgtgacagggacactgagagcctaagcaaatgatagagagagagagagaaaaaaaaaaaaacagagacagagagaacaagaacatgcacaaccctggggcacaggtctcctctccaacacaccagcaagatctattattgatggtatcagcaggttaattaagcagcctgttagtgatgatgttaagaaagctggcacattttcaactcagattgacaccattcaagactcaggcataactgatgtttgagcagcaatgtgggagatgtcaaggaatgagagagagaaagagaaggagagagaaagactttgcttcttgatgatggcaagctcagtgttaagtcctgaagagaatttgctcttgcctgctgcagatgttctcacatccgacccattgcgatgcaaaatcatgcagattgtgaaaagctaatgaagcacccggtgtaaaaggggcagtgtggggaggaagaaagagcagtagacagaaagacaaatgtgcaagaaagttctccaaaagaagatcatgggggagcctgcccctgaactagggcaggaatagacaagcagatcaatgcagtacactagtcctgcaactcacccatctgtcagggaaattaattggtagtaaagcagttctatcaactcacagggaaaggaccatttaaacacagacatgcagcaatgggctactgatttggggaaaataaactaccataactcctcaattctacgatgcaccttcccatattttaatgttttaaaaatcataatgtgccttacaatgaaagtcgtcagagaagggaatcttacctgctactcaacacaattgcctgtacatgtgtgaatgcagccatgtgtacaggtatccattcattcaagtgtcacctcagctgaccacagcaatccatacagaatttgaacttaaacttagattcctaattgttgcctaaaacatctttctaaaacttacactataatggagcacggacatgaaaagttattgtacatgcagaagatcgtctgccagataccaggcaatgcaattaaagacagtagaaattgccaaaccatagatagctaccctaaagaaatgcttgcccatatgcacaaagagacatttacaaggatgttaattatagcactgtttgtaagagcaaataattagaaacaacctaaatgtccaccattagggaactcacatgggaagatctccaaaacaaactgttatgtgaaaaaagctactgagtatgtacatgatgatttactgtatgtaaaaccctgtaattggcatatgcacatatatgtgtgcataaatccacaggtaatgttttggaaggttcacagctcacagagtggtctgcttggggaaaggaattcaatttgagaattaggggttgttgaaagacttccacttttttacaccagaattttctataatatttaaatttttacagtgagaatataatcatgtttcatttacccaaaaagtaaaaaaaaaaactgccaaacttcttgaagaagatcacacacattttaaagccagcagggattgacgtaacctagtcatgggtcccacacttaggtacctacaacatgtcggcttcctaaagaagctgattaatttcaggaatattttttttcttcaagtaaagaacaaatatgagacctaagtataaccaaatcagaaatgcaaacaaaaattcccaatattcttttatatgctttgaaattatactattcatcttaaacaggctaaaggagtggagattagaagcaggactacaaaaagcagtggtggccacgatgctgtgtttaacaaccaatgcccaaaaaagaacaagaaaatgtgaaggaggcttagactccaactctgtggtactaaagaaagtgactggtattgaatgtgtaagtgaatacttgcttattccttccaatggacactaattatagttctcttctaaaaggctattatgttaatacctcttataactcaggcatcttagaaacacagcattcaagatcgatttagaaaccatactataagatatggggacctggaaagtgatatttattacatatgataaacaaagggctactaatcttaagttatggagggtcatggtgactgactcctaagagctattctacccccgcccgagattaatccaaactaatagtaataatcctcccacgggcagtgactggtctaggaagaggcatgtgacccgattccagacaaccaggaatgtctgctggggacttctggggaaggtctcctcccatctaagaagggttgagaggcaggcagagcctcttgtcctctggacactgggtccagacgtgatgcttggagctgctgccgccatcttccacaagcctgagatgaagcccaccaggaggccagcagagcaacactgcgggaagcaccctggatgccccgcctgagactcgccctttgtaaagtaatagactcccttattatttaaaccctcaacagtttgtgttgagggtttctgctaatttcagccaaaaaatccatacgatgtataagagctttaacaattattaagaaaaagatatggtgatcaaaatcatagaaaaacatatgagtaggcaattcataaaaggctgaaaaactaataaacatgaactcaatctcactaataatcagggttaggtttctagatctgaggaaaaaaaaatctgcaggagttctttataggttttggaggctaaacctcattggttaaagggtttacaaacagctattcccagcctgtgacttgtttttctcacaacatggtgccttctgtcatatagtttaatatatagtcagataaagaatccttcctggtatatacattttgtgttgttaagaaactctaggtggggtgtggtgcctcactcctgtaatcccagcactttgggaggccgatgtgagtggatcacttgaggtcaggagtttgagatcaacctgcccaacatggagaaaccccatctctactaaaatacaaaaattagtcgggcatggtggcacacgcctgtagtcctagctactcaggaggctgaggcaagagaatcacttgaaccaggaggcggagactgcagtgagccaagattgcaccactgcactccagcctgggcaacagagagagactctgcctcagaaaaaaaaaaaaaagaaagaaagaataaggaaaaaaaaaaaaaagaaactctaaccctactccagtgttcatctatattttcttccaaaggttttaattttttacttatcacatttaggccttcaatctatctagaatttttttttgtggatggtatgaaataaggatatcctcttgctctctcttctgtttggaaacccaaatgtccaataaagttaagaaaaggttcccaactatactgggaattggaaaaatgcaaattaaaatgagaaataaaccagttcagatgaacgcatttttctttttctttctttttttttttttttgagatggagtctcactctgacacccaggctggagtgcagtggcacaatctcggctcactgcaacctctgcctcccgggttcaagcgattctcctgcctcagcctcccaagtagctgcaattacaggcgcccaccaccatgcccagctaatttttgtatttttagtagagatgggttttcaccatgttggctaagctggtcttgaactcctgacctcaggtgatccactcgcctcagcctctcaaagtgctgggattacaggtgtgagccaccacgcccggcccagatgaacaaaaattttaagagattgataatatcaaatattgaagaggatgtagggaaacaaaaattcagaccctgcaggttgggtaaatgcccgtatgcccacctggcaatatttaataaagctagaaacgtatgtaccctctaatgtgtccattccatgtctgggtacacacgctagcctggcgattcccagcacaagtgaaaccaaagctgaggtagggcccagatctgttttttttttaaattccccaggtgattataatacagatgaaggtttgaaaacttttgcccaggagaaactcttactcatgtgcacatgagctgtttagagcacaaggttgtttagagcaggactgtataataatgagagactgaaaacaacctaaatgtccccaattaatcacctgtggatagccacacagtacgaatgcctatggcagctgaaatgaatgtatatgtattaacataaataaatttcaaaaccacaatgaaaggcaagtttcaaaaggatatgtacagtatggtacagttaatataaattttgaaaaattcatgaacaatacaattgatggcttatggtacatgcacatatgctaaaatataaaacctaaatggtaagcatacactaactccaggtcggtgccttctgtggggagagaaagaaaccagaatcaagaaggcagagggctttgagtgtatctaacgttctctttctctatttcttcaattttctatgttaatagaaaaatttcataattaaaaaaacaggccgagtgcagtggctcatgcctgtaatcccagcactttgagaggccaaggcgggtggatcacctgaggtcaggagttcaagaccagcctggtcaacatggcgaaaccctgtctctactaaaaacacaaaaattagccaggcatggtggcatgcacctgtaatcccagctacttgggaggccaagacagaagaattgcttgaacccaggaggcggaggttgcagtgagccgagatcatgccactgcactccagcctgggtgacagagcaagactccgtctataaataaataaataaagaaatcatttaaaaatagccatggaacaaactactgtggctattaaggagaagttacaattttatgactgccatggaaagacatctaaaattgactgtgaggttaaaaagcagtttacagaatagtatatatatatctatatatgaacccatttgtattaagttacatttatatagacatatttatacactacatatagatataataggcagagattcatatacttttagatgttaacttgaatttggagggatatatactaaatgactcgggagagagaagtaggattgcttattctattatgtattatcagaaagaaatagagccattttcattaaaacgaacaaacaagcactctagtagcaagcatgagacttcagctgctattctggctcaagactgatgttggactaagtacttccatattccacttcctcttctgcaagaagtgggaggtaatgctggcctcccctcccctcttctctcttctctcctccctccctctcttccttccttccaccgttgtgggcaacacagtcaatgattcaaatggtgtaaaaggggaaataataaaaagtaagtctccttcccaaccctaaactttaccccctccccagaggcaaccactatagccaggttctcatgtccctgcccgggaaggtctatgtatatacatgtaggcatattaccacctttacacactcacacatactctctctctcacactcgaatcacagcagaatacaacccctctgcctttaagacagtgatgattatcaaataaggatgcatgccctcatatttgcttgatttcacaaaaatccccattattccacctgagaggcagtgctaagtaagcagcacaaattttctcttaagtagcttgagaatttggggagagtttcacaacccatattgaagtgtcaccgactcaggatcgggaatttctggattgaaaaatcagcctgtaagtctaggtgtaggctgactcggaagtttggaatctcttaatgtgattcctgctaacacatccatctttttaaaaagcccctttttatcacagctgcctcttagcttgagattcttcaatggttcctcatcaaccaaagataaagctcaaaccccaagctaacactcatagcgacaacatgccctcctctgttccccagcaggccaggccagcccagccaggccccctgccccctcctgcattcccctcctgcatagcccctccctccctctgcattacacctccccactttctctgcctctgggcttctctaccttctggatttcaggaattataaaaccccagaactggaaggccatttacgcaacaagcacttatggagcacctacggtatgccagatcctgagcaagctgcttggaaacaggtgccttggtcgcgtgcgagtgcccctcacagcttctggggcctgtctactaatcagacatttccctcaaatccaggagtcaggcagctcattccaataacaggctctcatttttttcagaagatcctgtcactcttatggcgttaccacttatcagagctactcttgacgtgtacagccagaattaaacagactcctttgttcttggtgttctatctttagtaatgcagctgaaatctgagtgagcatcatcagaggcacacaccacaccagggacccattctgagcacacggcacacgagacccccgggtctctgtcttgagaacttcagccaagtcaggtcttgacaccctcacacttgtgcacctacattttttgaacagcaaggcttacatcaaaccttgtgagatctcatcggcccacctcgatggatctttttagatcctggtgctcttgcccatgaattcacaatccctgccaggttggtgtccctgttttttgaatatgagccacaggcctcctccatccaaggcatcaaaataactgaagggaatgaaactgaagacagagccctgggacactagacactttcctctggctgccttggacccactgcctgtgtcctcttggggcctgacacacagcaggggcccatgccagttctgaggctgccaccaattctggcacccagcccagcccaaccttccatggctcctcaaaatccacagcaccacgcccacatattcctttgataacatgatctaattatccccgcccttttctcaacaaacaccatttccgtacataattcagttcatattagattcctaaaatcgtagaggtgatggaaggtgatttagagagattatcgaatgggtttcatcctctataaaactttattgcccttatcactggaactttgtgtgtgtgtgtgtgtgtgtgtgtgtgtgtgcgtgccattttgaacatctaaccacctcttacccccaaagaacaagttccctgatggcaggaatgtgccacccctgattggggcaggaggaacagagtggagctggaagaggatcaacatttagtaggtgctcatgctacgctgggaaattgacatgttcaatccccatgaaaactttgcttagagatactagtatccattttatagacggggccataatggcctggaagggttggataatgtgcccaggatgatctggaaaggggtgggcccattggtcatccaccctaggcctgctgactaagagtggaccacagtgatggtaaaaatgtaaacaagaaaacagagcactccaaaacaactttaaaaagtggaaaaggtccagaataaatgtccaggtagctacagaatctggccaccactgtcatcagggtgaggttctgccacgagtgactcatctcaaaccttttgtgccaaagcactcatttgatcattgaataaacccacattgagcactgactgtgtgccaggcaccgagggggctgagtgtggtggtagatgagatccagtccctgccttggggcactcaatgtctaatgggggaggcaggcttggaaacaacacgggcagtccccagatagacatcggcacacacaggtagctgccatctaaccctggctgggactcccagcgagggcttccaagaggagatggtgtttgagcagagtcacaaaggcctggtagtcgagggagggcagagggtgcttgaggtagtgggaagagcaggtatccagacatcagggccacatgcaaaggcctggggcccggcaagagggaggagaggaggacggcagcgttctccagggctgcagtggggcacaggagaggcaagagcaggccaggtcaaagaagggactcatggcatccagaggtgcctgaagggcatgaatgccacgtgaagcaccactgaccttgatggatggaccttgatgtcacagggcccaggacaagctgccacaggtgcacactgctgcctcctgctcacaggggatgaggcctggggagctgtgctctgacctgggggtaggccctccagacttgggcagcactgccatggccactcctagacggaggaagcagggtggactgagcacaaagggggagcagtggagcaaagaggggttcaatgacatgaagacccgtgtggccttggggagaagggggcatggacgtcagggaacaggtttgccacacctgtgaatgaacagaagaccttctcccaaatagtgccaggacaccctgggcaacggactcattggttaacaccgagatcttttcatggcaataaaataaatcctgacatttaacataggagactgctggggacggcacaggaagaagtcatttctcagcaaggagctgctgaggctggcatttccggtgcctgcaggaagcttgttctccttggaaggagcagctggctgatgccaaagctcaggccttcctcatgaggagctcagggcctagctgggggtcttgatgagcacatgacactcactgcctgttccctgctctgagtggatgcagccaggcagcctggggtgaccttcagggcttcctgccctccccatgcacacacctacccggagtccagagggccagctttatagatgtgcttgctgagacaacacctctgtctccacctccctaaggcccctgccccacccattgctgtcaacgagatgtctattcccctggccactgccacctctgggacccaggacttggccctccttcctgctggtaactgctcctggtacccctcctccaaggccccttgagaagcctgtggggccggcaacccctggaacagactctgctcacagagactggtggctagagctgggggtgtgtatttttccaatgcctcctctactgacctttaattacactgtttgcccagcttcccaaaccattaacttcacctggcagcaaccatacgtcaattaacggagggcccgctccgagcttgagctcctgaacacaattaggcgtgacagtccacaaataagaaagaactggagaattaattaaggtctaagcaaattaattaccagtccccaatcgattccgatgccagcacacatgctcctgggctcactgtctttcctaacatctccatgtataaatagaaactgagatctcccacacgattgctgttctagaccagggacacagcatggccctgaaaccacctctctccaaggggagagaaatggctgcagtgagcatcccagggcttcccacatactcagcacatgtgcctgcacatgcatcagtcacgtgacacaggcgtgtgcacacacacactctgaaaaactaggggggaacttggaggcagaacagggaggacaccgcgtagccttggctgcctccaggccacactgctcagtttctcagctatatgggtgaggggttatctcacagggcttgaaatagccctgggctgggcctgggaggcctgggaggcctgggctctggccagctcagtatcacttttagcaagtctgactttgttcattcttctgtaagagggtgatggcttgctctgccttcggaccctcccagcacagaatgaggagaaccgagggaggagagaggcttgctagggaatatgaggggagccgtgcagcccccaggagctctgcaaacctcaaggaggcctgcagtcacagaggtcctggtgggaaggggctgaaggagggtctcgtcagaggcctcgtttccagatgaggagacagcgggtagaatggggtgggaatggtggagtttggtgtggggtccaggtgcgtgtgtctcaggccactcttaggcagtgtgtagcccacctcccaggcttcaggctggggcctgcagaggagctggcagagccttgggaagaagaaactgactcttggggattccttgttccccagagcttgagttcccaacctgctcagaagtgtgagagcctggatgcggcctctgaccacagggcacaagcctcttcaggacccccatcaccctgaagacccccttccactccactcacatcccaacaacagagcttaaatatgatcactgccactttccccaacctccttcccatgtgcagtcactgctcagtgagtcctgtctctgcaagcagcctaaagggacaggggaccctccacaaggtcaagcacagcctgagccagcttcttggtcacctttaacagtggcccagccaggtctggcctagcctacctcggagacctgcagtgaaccccgggcaggacctaggccctgccagcacctggtgcagcttagggatactctggccaggggtacctggggataaggtgaagagaggccaagtacagggactggacggtggcctgagaggaccagggggcttttgagtccctggtgggaaagggccacacctaatcatctcaaaactgtgtcagcatggactagggcagtccgcaagtgtccacttgcagatgagagcgatggacatagggactagagagatggaagcctgtgggggggtgggaggggagactggggctggggcagaaggcaggcaggtacccagccaggactcagcagccaggccagaggaagaagccacaaagggcctgcctctccctggatcccgcaagcaaggactgtcagggcttaaaccacattatgcaacccgtgagggatgttcaggatctcaagacaacagtggctgcacctgtgtgagcggctgaagcctcattcccaaaaagaagaggggaggggaattacactggagtctgaagaggggcaggtcagaaagtctcagacccaaagcagggactctcctcctgaaagagtcccagagaggttaagaccacctcaaggtgacacagcaagatggccagtagggctggaatgggcccccggcaaagttcttatctaaagcttggctagggacagattacatcttggccgaatcccagatccagcccagtgcagcagagcgctgccccttctcaggctgcatctgaccctgcagctgaatggccgggaacaccagttgggcagccgtgtttgctttattaggccccttaacgaagtcagatctaaagggttattccattaatggcccacgacagaaatagctgaaagttcattaaaagtgtggagttgctatagcaattatctgggctggctgaggctgagccaggtggctggttctcggaattcattagtctctgggtcatccagaggtggggctgcccagcaatgacctctcaccctctcacagggctttgcaggtgcttcaaagcaccctcctctcagtggaaactggtttgtggcctcacttgctcctcccagagctctgggctgtaggaaggtgggtactggtacccgccttttacagatggagaagcagggccctgtagatgacgatcagggtcaggaccatgagcctgggtctgactccagctcttcagatggtgccttggtaccacagaggtcacgagtcctcatgccctgtgctggcctgtccccatcgttgtcctttggcacagatggggagctctgctgttatggttcaaggactggtttatccttctcttttgacagctatgcactgccttacactgctctcaatactgtttatttctttttagttttaaaaactccttccactattttgcccttctccccaaacaaggtgtaggcttcttaagggccaagcagagttttgtggcatctccagggccccagcctggggcatctatggtgagctcatagactccaagttcagcaaagacgcagctgaaatcccctccacatatacctgtgcgcccacaatcacctgcgtagagccaaggcctctgaaacctagaggctcacaatacccaaaggcttgaaacctagactagcagaagcttgcaggcttcttttgtaccacgaaccactctggtagtctagtgaggcctatggacccctctcagaataatgtttctaaatgcataaaacaaaacacataggatcacaaagggatcatcctgaaattaccaaaatattgtgatatagtaatagatgttttttggggttttttttgttttgttttgtttttgagacggagtctcactctgtcaccaggctggagtgcgtgatcttggctcactgcaacctccaactccctggttcaagccattctcctgcctcggcctgagtagctgggattacaggcatgcaccaccacacccagctaatttttctatgtttagtagagatggggtttcaccatgttggcaaggatggtcttgatctcctgacctcatgatccgcctacctcggcctcccaaagtgctgggattacaggcatgagctaccacacccagcctagatgtgctttttaactaatgaattaaaaacaagatctatcagttgatgtattaaatatgaattagtgaccgggcatggtggctcacgtctgtaatcccagcactttgggagggtgaggcaggtggatcatgaggttaggagttcgagaccagcctggccaacatggtgaaaccccatctctactaaaaatgcaaaattagatgggcatggtggcgcatgcctgtaatcccagctacttgggagcctgaggcaggagaattgcttgaagctgggaggtggaggttgcagtgagccgagattgcaccaccatactccagcctgagtgacaagagtgaaactctgactcaaagaaaaacaaagaaaaagaaaaaagaaagaaaatatgaattagtgttgagcataaataatattttaagacctctgtaacaactgtaatgtgccatgaaaacatctgtgatttctactggtgacaaagtcacaggtcctgcttctgactgtggtttgctgcctgcattcgtaacggaaggaaatgttaaaatgcagttagaggttaatgtaaatcttttccctgaccaagctcacaggatccgctgcattctgtctactgaccccttgggggtctgggactgcagcctaagaacccctatgctgaaagcagaatctcagcacagagctggtcagtgggaccccatggtcttgtcttttagctaaacatattacaccaattctcccagctgggtgccccctgggcatcaggagaggtgtggaagggtcatctgtctccctgggagcccagcggtcccccacacccacccacagcacacatctatgtggtgtgcaggtcttacctacagcagggaacggcacaaacctctggatgagaaggcgggtggctggggtgaacttgttggctttctgaaccaggacattaaggcccacctttgaaagaaaaaaataaaaacacagaaaaagtacatgatgctgcagtggcttgtgggaggagggggcagaactggaggaacatcagagagtgagggatgtcatctttccccacaactgcacctcacacccctaatcctcagcgtcacctgaggttgcagagctccagcgtcgctgcttaaagtaccactgcccagtcatcccaggtaactggcccatgagaaagagggagagaggtaaagcatcagagacatacacacacacacacacatacacacacatttacacactcatacacacacactgcagaggagaaaagggataggatgctgtggcagttgctcgtagaagaatacatactccatgaataaatgaagtgtaggaaggcctcattcccaccccagccctaagcaccatctttctgaaaccccatggtacatgcaggtgtgggcccagccagaccataagggctcaggacagggagaccccgacacctgcccacaggctgcaggactaagcagcatagctcagggcaggatggagggtgaggcggatgtcctggactcactgtcatcgccttcatacctgtcacctggcccaggatgccagacaccccaccccagcccctgcctggggtcttcgtcactccagtccatctcctaggctctttcatctttcgagagcacaggctttctcatgtgtgccacaccagctcctctctatgaccaacgtgtctgagaaagtgtcatctccttcccacagcagccttggcctccataacctcacttcccctctcccccaaaaacccaagttcaaccccgagagtccagtttgctgcccatcagatcctccgtgagccttccagccatggggcctttgcagtgctggtccctgtgcctgggatgcctccctcctccgctcagttcacacctgttctttcaggcccacccatgagttccacctccagtgtcacttactagcagtgggacctgaggcaggtaagtcatttcatctttctctgtctcagtttacctatctgtaaaaagggatagtaatacctacaacaccccagggctggtataagaatgtatgtaagtggtgggtgtgagcttggcatataagagacctcaataaatgaagctatataatcatgatgtcacgggaccggatggggtgactgcacctttttcatctttgtatgtccaccacttagggctacactcactggcacatagtacacgctcaataaactggtgactgaggaataaatgcaggaaccaacaaacatacgacggcatggaaaaggcaaaggctgggagtggggctttgcggaggagagaaagatggggttgggctaggcagaggaaaaggactttctggtggagaaatgcatacaagtgcaggcctggagagagaaaagacaagatgcatgaaaccagaaaaggagttgggttgcagaggcctctgcttccccagacagaggccaaagccagcccctgtgctgtcttttctgggaagcgtgggaggagccgtggcaggactcctggcctgacgggccggggcagcctgctctgaggtctggcacgcctggcggctcagcagcccaccctgtgccctcaggcctggctctggccttaatgttgtgggtggttggggaggacgcagagccttgggaaggcctccagggctgccaggcgcctgccgctgttggggcagggtgcagcaaggcagaaacagcccagcccaggctgcgactgtgagacccaggaagacaaggaagtgctggtccgccagccccggggcagcgcagcattccgtggagccagagtacttcctggcatgcccaccctgggctctcgggaacacagcctccatcttaagtctcaggctgatcctcagagtccaatccttgtcctcccagctcgctcgagggaaggctgggaggcagccaggggcatcacggcgtggacacacttcagtggtacagtgggcagggctggggagctgccggctcatactgggccctgctgcccccgccacatgaatagaattcatcaagtccaggagcgagtgactcagaaatggcctccctcacccccaaaaaagtgcattgagagaaagtgtgggaggaagctggaggacacgcagacgggcagtagcaatgaagaggaggggggctcgggagaactcagtgagcacttcctacgtgaggccactcagcacatattcacatgaaatatcttaatgagatccccacaacaaggcttttagatagaccatgttggcccttttcacagatagagacaggtccagagaggttaaacaactttgctcaaggatagacatctattatgaggcaagtaaagctagcatttgaacgcagggcctgctaattccaaagccttgctcctaaccagggtgctatgactttcccattgtcttccacctgagggagggatgctttaatatctccaggcgtttgaacggcacatctgcatagcaagcacctccctgacaatggccaccttggggctggggtcctaacgagtggaaaacagaaggcagctcctgcagggaagatagggcccttgaaccatccctgcccccagcagccagaagtcagaagatctgggttcaaaatcctgcttgacaatttaagaagatataggaagtgctggaagaggcggggaacaggagccattcacggaagtgagcagagaggctgggacccttccccatgacagcctcttgggggtaggcagggctggagagcagcgggagggaaaggaggaaaggtgaccatcacatttccctccccctctccaaagcctccccctccctggtcggccattcttcccactggctaggcctggcacagcccagagtgtagggaggaagaacgaagagagaaaacagtgtcctcgtcccaggtttcttctggcctctccttccctgaaagtcaccagggtctcccagcatggatggggtgacatatagtgcggcacacatatgtttctgagagcatggccaacgtgcctgcgcccaagaaaggggctggggaccagcaaagtagggaggagacctgggcatgtgtgtagctgtgagctcatgaggagtcagtgaggtcacagtgcccacttgccagtgatgggcccagtggcagggagggcgtggacacggaaaaggcaaatggccacttaccctcaccccttcccaggccccagcccaggtcttaccgccccagcacctaggacagccacggcctgagaaggaacccaagatggctgcagaccaggggttaggagcccgtctgttctggttcctcagggccctttggccttgaacatttggtagagcccgttaaaattaaaaagccaagaggctggtggctctgaatgccagctcgtttttccctggcacggcgggtcctgtttaagggaaccagctggtattaatggcacacagctcatcacaaacagcagctagcgatcagaaaaatcagagctaataatcgggttcaggaaagataatgagatgtggaacaattactgctgagggtcccccaggatctgttttaacagcatccaaataagccacaaaatagaaattaaccaaacaggagctccattttggtagatggggaaaacaaacagggtgtggattttgcacaagaatttcttatatggccagcagacagggcttcttggaaaaccagggctcaggccccacaggacatcagcaacatcctgaaggagggaataggccttcttgaccacctatctccaaggtctggctactgggccagtgaatttgccatgagcagctgacaggagaccaggggaaaaggagggaaggccggcttcctgatagtccccacggagatgggaacagggctgaccagcaccaggagctatgggtggggtgggagcttcatgacaccaaatctttagtgtcatgagctacacagctggtggctgtagccttaagtaccaagggctttccgggccaacaacaggccagcaaggagacactggatgaggctggaagaatgcctgcatccctctccccgcatctgtgcccccactgcagcctgaatatccattgcctggaggatgcctctgtgtccaagggctctaggcactccagcttctcgcaccccaaatgaaggttgtctcgttcttcctcacccacaccccagcctcctcgcccatttccagctctgcttctcatgccagagacctcacagcgttctgggcaggagcctcctggggcccacgtgtaaccatggctccctggtgcatctcccggatgtcatgaatgcagctgtttgctctccctgctcccaacactcagcacgcagcctctgtccctggatgacagtgcacctcctaaccaggccccctgtttccactcttgcccccatccatctgctctctacagcagtcggagtgaagtctgaaaacatggcgacttgcttaaagccttcggtgacactggaggagccacacggccctgcgggactgcctggcttgcttgcaaggctctggctacctgtatgaggaggtgccgtgagggagtgggcccaagggtcatgaaggctcctgaggaaggggatgcctgcctgagccctgaataggaggctaggaagggagcagggctcagccaaggatcagaagcatgaaataccaggttgtctgcggggtactcagacgacagtctacagactctattgcatcagtcattatgggggtccaaatagccctgaagaacaatggagtaaggggcacgcctaaaaggagggcccctcttgggtggtagataataatgtaaccaaggttaggggtttgtgagggcaccgggggcaagggtgggggaaggtcaaggaattgctgaagtaccaaaaatatccaccagagggcacacttagtagcacacattggtagtcaagtggacccaagaccctccatggaggtcaattgttccccaaccccagccagcctgccgcttggcaatggggtcagcagcaaagtagccaagtagctgggacagagctctgcacaggctaaaacatcagttgctccagctgtgaccaagtggcttgtttgctggcaacagtgaccaatcctgacccctgaaccatgccccacaagggccagggggctgctgggaaatcaattacatcagaccccttctacatgggagggggcaacaacttgtcctacctagaaaagacacagagctgctttctgtgtctgactcacactgccagcatcaccatctgcaggcttctgaacactgcagattctctacagggtccatgagatggaccctccaaacccaaagccaccccctgaacacagcaagacaatagtctggtccaggattcccaggtgctgtcgtccccctacctctctccagcctggagaagaacagaagggcctgaggtacaccctccaccacagagccagccaggccctgtcttataggcggcagggcatgctctgggccagggacaaatatatgccgctgacttgactatagccagaaaacacaggcccaggaactaagtatgaaggtgagcagagggttgaactctgttatacctaaagaacctctcaaaaaatgtctcccagtccccactgctctcagggtacctggggaaggacttgtctgccaggaggcggcacggtaatagctcctccaacctagaagctgagaacaccactcggcttctcccacctccttatgccacagggggtgcagcaggaaaaaggaaaaaggggtctctgtgtgtgattaagcctgggtaggccctgtcacttacttcacctccatgcctcagtatcctcgtctgtaaaatgaggatgaacacctaaacaatgcctggcgtgctgtaggcactccagaagtgctagccattattactaatctcatgactactttccagtctgactatccagggacacagagttgtcagtaagcaatgggaactggaaggtgtatgggttcagcacagggatcccctggaaccccttcttctatgccagtgtctggtagtgaaggttaacagccactgcatcctacacagaagggaccccccagggcccagaacctttgagaatggagctcagcattgccccaacagggaaagacctcagccagctaagaggtctggggacagctaagggtgtgaggaatgggcgtgaagtgcctctcatcatgtggctcccccaggcagctcctgactggtcccacagcacttcatccctgagtcttcctctccagccccacgtccaccctcattcaggccccttgtccatgagggtggccccaccccttctcctccagcccacttccacctgcaccatctgcgacacccaggttcccgagcccaggcagggctccaggcatggcctccttccacctgagcaaggcactcatggcacctcttgactggccctgatcctcctccactcacgatcaccatcactccctacccggtggccgccctcctgttctgagcccggagttggtcatgctctcctgtgcacctctgcttgtacggtgccctctctctggaacacccaccctgcctgcccctggctctctccattctgtcctacgagtcagccctgtgtgaagtaggggcccctccctgctcccaccacaccctggggtcaccttcatcataattctgattataccacagagccttctagcttcccctctcagtgccttgaaagatataccagtccctgaagcccccagcacctgcaaagtacccgcacatcacagtcccccgatgggagtcaatgtctcttacttcctctcaccctcgtgtagccggggcccagggagggccgcccacagaagtgcttaatgcaaactcttgaactaaaaaacagtgaggattgagagaggcttcctttgttaaaagacagcaaactgttagatttcaaaaataacttaagacgggatttcttttttattctcaagcaagcagccagacattgccaaatctatttagaaggttcaccaagaggctgctaatcccaccctggtggtcctgcaaccagcaggagtcttcacttgggggcatgcaaactggggatccctgactccagggttgctggccaaggtcagggctcctctgagtggggcagggagctcttcagggcccccagaggaggctggcctccactccagtttgccctctgtcccaaggacctgcttgcagcctgtcggcccccatccatgccgcctgcttgtagggactcgttttaattaatgccagagctgggccaaccactggggccgtgacacttgtttgcaggtcatctcctcctaacaggcttgccctgggaggggatttgtcactaattgaaacagagatcagttaatgaggctgtaggacctggggttccagagaacaagggaaaggaaaataaaataaagcctctttcttcagaggttttgtgacttacacacacaaaagaaaagcaagcaagctgccgattttccaagtcagaaactccactccatctgccggagttagacgctcactgtgtgaagacgtcaggcggagggacgccgccaccactaggactcgcagatcggaggggcctcaaggccagcgatcaatcagtggcctaattaataagtatttatggggcagtgccctgtgctcctctccatgggggagaagccatggtgcccgtccctggttaacttgtaatccagtggggatgaggctcagactgcagaacactaaggggacagggacacagtgcgactgagtgtgagtggggaggacaggagtttccaggacttgtgaggagggagagtgctatgggctggaatggttggggaaagcctttcgaggggtgctggagctcacagggaggagaaaggagggagtccccagcacaggcacagccccgcgtgaggccccagcccctgcccagcaagagctcagctctgggaaccccagagggctccaagtcccccagtaactctgtcttcagaacccataccccacaaatctgtgctaggtttgccctggcaagtggttgggacggagcggctgatggtccctcaggtggggcagtgaggactggacacacagagggctcggagctctcagaaaaagctgagttttgtttttttttttttttttttgagacagggttttgctctgtcgcccagtctggagtgcaggggcacaatcgtggctcactgcagcctcgaccttccaggctcaaatgattctcccacctcagcctcccaggtagctgggactacaggtgtgcaccaccacacctaattttttttgtattttttgtagagatggggttttgctatgttactcaggctgagaagctgattcttgttctctgagccccaggcctgcaggtgaaggaagtccaccaggacaatgatccccttcactcaggcctttccattcaaggccactcagcatccttccctatgtagcctcctcctctcaccttgcccctgagtctcaaaaaaaggaaggggatttttgagctgctaagctaagcagaccatcagctcctctcatcacaaggaacaaggaggaggtgacaagagttctttctcccactcaggggagcctttggccttcacccaccaagtccccagtatcagggacccccaatttgtctgactcccaaatgaagtctcctgctgggctgcaggacaagctgggtggcaggtcagcagtctcttggtgagccacctgaatgtctcacttcttgcttttgtgaagacataaggatttgggaaagagatcttgggcatgaaatgggacatcccacttcacagctatttggagatgacttggtctatgtgggagtgaaataaatgaggccatttcaggacaaccccaagtccctcctttagaagaatggtgaattaaattgtggcgtatggtacaatgggtaattatacagccgtgaacagttattatacagtatttacttaatggcactggaaagatgagcaaagggggttttaccaaaaggttattgtatgtgaattcttcattatatgtgaatgttttctttttcattagagataagatcttgctatgctgcccaacatggccataagcaatcctcccaactcagcctcctgagtagctgggattacaggggcacaccagcttgcccagctgaatggttttggggttttttaatttcttaaattttttattatttatttattttttttttttctggagatggagtctcactctgtcgcccaggctggagtgcagtggcgtgatctcggctcactgcaacttctgcctcccaggttcaagcgattctcctgcctcagcctcccaaggagctaggattacaggtgcccaccaccatgcagactaatttttgtattttttttagtagagacaggggtttcaccatgttggccaggctggtcttgaactcctgatctcaggtgatcttcccgccttggccttccaaagtgttgggattacaggcgtgagccactgcacccggccttttgtttttttaaatggggtcttgctatgttgcccaggttggagtgcagtggctgttcacagctgcaatcatagcacactacagactccaacacctgggctcaatgatcctcctacctcagcctcctgagtagctgggactacaggtgtgccccactgtgctcagctatgtgaatgttgtttggttttcattttctaattttttttttcttaccagttacattaatgtattgtgtaatggatgaaatgacagagttgtgaaggggcccttcgccctctggagtcggctatagaaggccatcctagtggggatccagagacagccagacgtaggtacaggggcgggctcaggggtgggacaagcatgcagaaggtcctggcagcttgagcgtccactctggctctggcccagggccctgactgtgtcacttgcccctggcctcctctgggaagcagggagccacacctgccgtaccctcacgctcagtctctgaacctcccctactgagtagctgctctggcctcaaagtactgtggagactcagagtgagcctaacgcccctggcttcgggcactgacaggtcttcaggaagagctggacgtgtgacaccagtaaggccatagagagggaaaagcagtgccccggcagctgagcaagagctcaggggagcaggcacatgggcaggccttgcagagtcattcagaggcatccccccaccccgctcgctccagccacgttaccgagcatgaggagcagctcttccgagcagagtgctgggcaaccgcagccccactcaagacagatgtcctgcctcagtgcccccaggcacaacctcacctccccacctgctctccattacagggagcaccaggttgtgctctgtctactggagcctcttctcggcttggaaagcctgtcctgactcctccacccacagaaacctgtctcccaaatccttgcctggcctggccctcagacaagcatccacctgcaatgctgagcggggtggccccagagcagcagagccaagaaggagcaggggagggagtactcacagcaatggagacggcgctgatgacagctcccaggtatccctggatgaacttggatgcaggtgaaggctggaaaacagaggcagaatttcaggcctgctgggtgcccaaagctcccatacttccccttgtaagctgtcccagccagcaagaagcatcctgcccaccagcctggaaagtgggtagaaggaagaggcccctcaggactcaaagggatcaggccaccctcagctcagttcccaatgcagaaatataaatcaccagtatccagggagatactgaagggcccacttcactcctgccctgttctagaaaggtcactggcagacagtgctgggtggaggtggagaacagcaaggctaacatggaccattgaaggctggggcaagcagtcttcagtttagaggctaaatgtttcaagggggccatttggcatctggagcgctttctaggtggaaatgccagtgtcaaggctctcacaggccttgccagcccatggaacagctgggctcccatgtcaacagatgatagctgcccaatatctctagagaataatataccccaagttccaacacagacaattaagaaaaagctaaggaacttgccctgtgctacaactgcaggtctagaagtgtctggtttaagataaagggagtcatccaagcagagatggccatatgtgaagcctatgagagagacttggggtggaggtttagatgtcagggggcagccacagcatatcaggcctctcaattcctatggcccaggccagctcctattcccctcctctcccccaaggtgagcaaatgttaggactctcctctaccccaaactgacaggcccccaaaggggacttagatgcatcctgccttctttgcctttgaattgaagttggggagaggtggccttgccagcaaagcaggggcccagcagcccttcctggacaacagaagggtgactgggcctccaccacaagctctccaaggagtgcaggggctctgggggggagttaccagccctggaccctccccactcaggagcagcccttcagcttgtggccagcagtcgggacctgggagcgctaaggcagcttccagaaattttggaggaagctttatgggaattttgcccccaagtagctgataccatcatgatccaaaacccaaatgtaagagctacccaagaagaatctgaaagccagccgaactcatcccttgcactgctcccatttaatgggccttcttcacttcatgtaaacagcccctccccagagggctcctggcccagaaactgcagctgacctcagctgagtcatgtctgagtcggccacccacctgaagggctggcattttaaataagatatctagaggagggccatgcttaaccaagaggcagccactgatggtggcatgtcacgctgtagggaggatgactgggcctccctagcctgaaccccaccactggggagagggcagtgatgctcaccttggtcgcattgcggtttgcatagttgacacaggcattgtggctctggttcagccactgaaaggcaatgatgagagaagtcagggaaggagtggtcacctccctggaagccaggcctggaccccaggaggccacacatccccagaaaggcacagcatgcggtctccagctcacatggtgccgcccatgctgccggtcagcatgactgaccgtcctggtttgcccagggctgtgctggtgttagcactggaagccctgcctctcgggaagtctctcggttcctgaatggggtcctgcgcaccccagtagtccacctgatcctgagacagtcacctctcttggaatgatggcattcactgcccctgcagaccccactgcctttgtcacaccatctttattatattacctgctggacaaaagttggcctagaatgactgacagccctacaattctttcaaaaatctcccagtccagtatcctgcacctccagttcccagacacagaggccggcaggagtttagttcagggaagactgacattttctcctagaagacagacaggttttccttcctgcccgtctttctctgcacacacaaacacagagatatcctcagttttcatggcatcacaacccagactgtctccaagagcagggaccagggtctgtgatgcacttcacaacctcaggttaggggtggatttagcttcctcagcagatgtgggggaggctgatgtcaaaatgaggctatgggcctcagggtcactggccttgggatgagcagccaaggggcagagtgggggccaccccactgacaagccagcatgttccaggcaggggcacgcagccctcatgacctctgtccaaaggttagagtgacacatggtggattgagacatgctgggctgctggagacctgctcagcagggccaaagtcctggttttccttcagtggcttctgggctaggggtggtgttggggtggactgaccctacacggggtctggacggggcaggagacaccacagcagggagttcttaaccagcacctgtgtgggcccttccttcaggagccctgtttgctgcgagactgttacctgccagaagacagtggatgccagtgtctggttgggcaagagaagaccgactacctatgagcaagagagaagaaatgctgaaaaaggcagaagaaacatcctatgcttttgcaaagaaaaaatacgctaccacaaatgagtgagctggatctgtacaaactgatgtggtatgccgtgtacatacaaactgaggttcattgagggagaggctgtgtgatgggaaaaaaccaagttgcagaattatattacagcataatcttatttatttaaagaaaaatcattttatatataacgatatacacaaacacatgcatacacacattatcttcaagcatgaaaaaacctgtagtgtggatgtctctggaggttgggttgcagattacttttgcacaatcttaaatatttctgtattcttttaaacaacagacatgtattatttccacaattaggggggcaataaaaacaagcaaacaaaaggaataccttcgtttccactcaggttacctgactgctcaccctagccttcccgtaggatttttgcgaggattaaacaaaaatcatttcaaaggccttaagtgctttgtaaatacaagttgggggaatttgtatctgttatctgtgaatttccatgaagcaaaaacctataccaggtttaagcaactgaatgaaacatagatttctaatatttgttgaatgagtgaagaaaggaatgaatgaagaaatgaacaaatatacacatatacacatatggctaggtatgggaacatgtagatccattattcccaaagcccaaatatcacctaagacctagacttgctgaccgtgtttttggtttaagtcaagatgaatggtctgattttgacactggccaagccttggacttcagggatccatgtgcatctctccagtttaccttctgagtgtttgtgtgcaaagtaacatctaccaagtcccactgcatatgggaaaaatgtgcacaaccatccacatattgacttatttattattcctgtagataaaatggctctttggcaagaatttctgtaaggaacaagtataaacactcaataatatgcagtaaatcaaattctagacatccccagcagcattagtaaatcatgttttaaacattaaaatgttttaaaacagctaacacacacacacacaatctatatttattggctcatatcagtttgaataaaattatataatataaagctattccatagctccaacgaggaattatgagatttttcccccagaatgagatcccaacttgattttttttttctttgcagtggcagcttagggaattagagtgagaatcaggggaacctgggtcttagattcagctccatccccatgtgatctctggcagaaaatgatcccctttggggcactaactttcttaaactatgaaagtgaaggggctgacctcagtttaaaattctacttccaaattctgggtagtaggtgtcaagtcaacagagacggtcttttctgtaatgggatcccatctgctaaggagtatcccaggaaactgaggacctcctcgtagttggggcccccagttagaagccagaccagagggagggagctgagcctagcgggggtggggatgggacaggggggtgggtgaagagtacatgtgctcctatgtgtacacgtatgcatgcctgactgccttctaccaccggaggaagttaataaggctgttcactgtttggagcccagcacgtcatcccctgatctggagtctactgaacacggtgtcttatggactacactgtcttctcctctgaatccccacttacccctcgaactgtacttggaccaccaggaacatcgtaagatacagcccaatagcactcactgcatttaccagacaactgctgtccaggacactgcccgtgacaccacagggttccctttataatcctcttgggggaaatattttccagtctcagggtcaggaactgtgcctctgaataactggtgtgcatgtgccttgcagacactgagccattcaactgagtctctttgcaccgtcagaagctcaggccagctctccacagccccatctgccaagtgtacagacccacactgcatggattctgtgcccaaacctcacttctggcttcattttatcttcccttccctaaccttccctttgtctcattttcatcttcacttgatttatctttagtggcaagcatttttaaaagtgacatcaagtcttttccagaacaaaccaaactagtatttgggctatgtaccacacacatacacactgcccatggctctgtgaccagcaagctttttactttgttagacaatccccactttgcatcccaacctcctaccctaacatgggtctggagtccatgctggcacctctgactgctatgagtctcctcattctttcttaaagagatggattgactgatttgattttgccacgcatttcacttatcataatcctcatactaaccctggggatcaaagcagagattacttttgatattttgcaaacgggacaactgaggcttagagaaattcagtaatctgtccatagcttcatagcaagctagagaatcaggtctcctggttcctggcttgggggcccggactctgattttagggtactccttctccagctcatccccttgagcgcagagagaggggagatccaatcagcactctgcatccatttatgaggagctgcttctacgtaccaagttccttgctgctcccaatggagaaagccagaggagaggaatgagtgcgcgcgcacacacacacacacacacacacacacacacacacactccttaaccacaataaaaacaaaaaccagacaagaaaatggaggatgacatcctttataacaccgaggcttgaaaatgacaagatggtttaatgaggtatttggttatgtgtaaagttgataaattttaacatccaaacaggagtttaggaagggaggggtgagtgtgtcccggctatctaacgaaggcggaggtaggagtgagccgagggggcgccgacacaggagcagggacagccgagacagcagagagactggtctgactgcagaggaggtctgggagaccagagggagtgtggagagggtgaggttagaagacaggaacaccgagctgcatcggccaaatggagccttagggggccatgtgaggctgaggcagggaagcagggatcctgccctccaggtccttacagtcaggcggggaccaaaagcacgaggatgccagcccaattccctattaggcaaaacgcagcaccatctgcacaatcccaggagcaagagcagatattttataacttccttttttctttttaagtctaaattaaaaataaatgttcccttcagctctcagatgtatatctctggtgcaacctgcccacattccctcccgctgccctttccagaacatggcaggggaaaggaagaaagagatggatagagagagggagccagtccacccagcttcaatgccagtggattgcacctcttccaagagggaaacgattcaggcgtggccacgcagacgggtggagagcgcccagaatgtggctggtaccaaggaaagtggaaggagagggaaacaggagccaacagctatgatttctagcccagcctccaccctatcgcgctgcaggaccttggccaaatcacacatcctatctctgctcccatttatagttcataacatggctgaagtcccctctgccgctccagccccctggcagctgtgctctctgcacatccgtctgtacctttgctgctccccttcattttgggtgtcctaccatggacctagtgattaacgctcaggctctggttgtcaaatgctggtgccagcatttaccagctatgtgaccacaggcaagtcactggagctctttgtgcctctgtttcttcacctgttaagtgaaggacaatcccagtacctctcaggatggttatgagaggaagtaaggtgtggaggaaattcgcctcagcatgcagcctgcagcaagcgctccctggatgccggttgccagtgccattcttctcctcccatgtagttctttcctggcctttgctggtttctttctctgagctccatagtcagcattacaccactgaacatcgtctcatctccatctcgggaacacaagtcttatccctcagagaacagagctctggaaggcaaaattggggcttttccctcttcttctgatgcccccgccatggcattcagcacaaagctgggcccacaccccagggtggaataacactcctaattattagataattattggccagggaaagatctctgctggactgggacaatgcactcctgactccttttattaagtcctaattgcagggggtgggggtgggagattgagtctttggtccagattatttcccactccctgcacccatacccttgccacggcctcatcacagaaggaatttatttcctcactttttggctctgcttggtcatctaacttgctctgactgacagcacgtgggaggacgtggcagcgtgtcagttctgagccctggctcagaggcctcatgccttcctgcttgccctgctgagcatctgaggttgccacgagaagacatccctgacaaatccctggtccaaggaggaggacagacaggagagacaggagggtacagtccatcccaggtcaggtcaccctcagttgaccatagtgagatgcagaactgcctcagtcaagctttgtctagaccgggcaaaccccagccaaccgcagatccctaagaatgaatgcttacaggcacggtggctcacgcctgcaatcccagcactttgggaagccaaggcaggcggatcacctgaggtcaggagttcgagaccagcctggccaacgtggcgaaaccccatctctagtaaaaatgcaaaaactagctgagggtggtggcaggtgactataatcccagctacttgggaggctgaggcacacgaactgcttaaacccaggagaaggaggttgcagtgagccgagatcacaccactgcactccagcctgggcgacagagcccaaagagcgagattatctcaaaaaaaaaaaaaatgctcacgtatgccactgaagtgttgtggatgttttctacacaacactatggtagcaatagctagctaatacacagcttactacatatgcggagtgactatgctgttctttctagtccaaaattctgtaccattatgaatatgccttgaattaagtcttcaccagggatgctggctcctaagcagccctgcttatcaaacccacccaatccaggggccatcagcccatctctagggctgccctgacaggcccaggaagaggggcagtttgtgcttgagcctagtctcaagacagagtaaggaatggggccaatggcacccatatggtaacttgctacaagaaaaatcacatcttcactttgggcctcctccttcagagtattctaactgctgcagagagatgaggtctcaatctgggagagaggcacccccaaatatctcagtctgcttggccagaagtggaacatgaacagctgaagataaaggcaggaggggtaaggccactgccacagttctgtgtacgatgatatcaggactcagaactgagcaagcccccacccccttggccacctcccatacaaaactgactcaaactacaggagaaaggtttttttaaaagcgtgggaaacctggagaggaaatggggtatgcgtcaaaacaattgggtggtaaaactgaagccaggggaagactagggcgaactgtcttgttcgccaagataatggaaataatcatccctctcacccttcaccccatttctgcttggctaatccctccctcctcatccttcaggtttcagtttaggcgtcacttcctccaggatgtctcctctgaccctcacagtgaggttaggtctgtcacgcgctctccggcaccctgcatgccttctctgtaccattcacctcatcagcaaaaagctgtggaaagtttatcttcctcgagagcttctataagcttcagagaaatgaggcccctccacgctgcctccccacatacccgggagcctcccaggtagagcaagtgtctttacatctcatccccttccgccacactgactcgctcaactccaaaatgttcctctttgtcatccaccatgggccgcagtaccccaacacacaacaattgtcctgttttttccttctactgtgtctccatcttctgatttatgtggctaatgatctgaaagttacacttcagtgtataaggggtgttgctacttaaaggatgtcagccagttaaagaaaatctctgtcaaatgaatgtttaccccagaccggtcaattctagcttcactggagcgacacctcctgtgtggtgagctaggtcaacatggctggggtctggtaatgctggaggaaggccagggagaacattgggattgggatttaaatgtgcaaaaaagcagaggagggatgaggcggcttgggagatgtcaggagggccctgggaaacacccctggagatgaagtggccgacaccagcatcttctgatacttagagtctctaagcccatgtgatcacctgtgtgttaaaatgaaggagtgcaaagtacagagtccaagttcttaatgtctcaagacagaaatcggatttagacttaacctaaggccaccagacccaataactaggtgttcatggtctgccctccttagcaccctgggctggaaatgaggcatttggtccctaagttttgagagttcgacatgacatggagcggggagaaggagaggggagggaagcagtgctgtggggagctcagggctgagagaggcacaaatgctctctgggagagccccaggcccatgagggaaacccaggccctggcatccgaggcattccgcagcagccaagggaagagggcgcaggagcagaggagaaatggagagggcaggcaggacgagggccggaccaccagggccaagccgggccctgcctctcccaggccacgtgcatggaagcggcagtgctgtgcttaggggaaacctgggaagggagaggccgtgtataagaagcaaccacgctggcgggttttttctggaaagatacctgaagaaagggagtgacgaaccgcagagcctcagggacagcctcagtgcaccggcatagccgcggtgcttatgtataaattgggatctctttgccacacaccgaagggggaaaaagttcccatcttcaaatgttaagcttaaaataagacactacatggttgccagtggatctgtgaaatctgctgactaaactggcaccagcctctgggagaaaaccagctcgtttctcctgagctctggggggcgagcagggtagggcgaggtgactcccgggcaaagtggaaacagcgtaggggtcaagctggggatgtgcacctgggcagaaggcagcttgactgtggtttccagaagcttctcagttgaggcacctgccagccttactcgccccttcccttcatcactcagggacccagttcctagcacattcgctggcaccctcgtttctattttggtaagcatttttagtggcttctgcatgcgtatattttcttacccactccatcagaccaggggctttcctaaggtgtggactggaaccttcactccccttcagaccaggcatttgcttaaatgttcagtgctaccaggcgacagcagggccttggagaagctgatggggctgcaggaagcactggagcagccagcatgctctttccacacaagacgaggcagtggcccaggggtggggaggagtggtgacggaccatgttgcttgtccatgtgaaagtgccaaggtgggaggcccaggttcttcaaatccagtggttcctctggagactcagcctctggcttgactgttctgaacctcaggatacagatatctggggctaggaagtggggataggtgagcattgtcatttcagttctggctgcctcgtagagctgctgggaggtatcccaggccatgctccccatttcgcctccatcaagtattcacacaggatcttgggggccagggcatcctcttcttacaccacatgcgtttattcacagaaggatgcttgctccaggctgggaaaggatcggtcctgttaggacattcacagcatctgcttcagcaatgaacccctgaatggcaggggagtggatcagcatccaagtctcccacctgcctacagggccatagtgaccctgcaatgatgggcttgtctagggtagggtaaggagagagtggaaacgtatggggtgagcctcagtaactccttgtgaatggaagacagtgctggcatctgctgggttggccagttcttcccacttgatggcagctgataattgtgtaagggtccatttggcttctcagggaaaaatgagccccacattcaacttttgccatttcaaatacccagttacccagtttaacaaagtgatgataccaccaaattgtatatcttttaaagtgttgatggaatatttataaaagttattatggcattcttgtttgcctatcaccattcttcccttctttcttactaatagaatccttatataattggggatcaactatatacccagctaaattctaaatgaaatgtatatacccagctaaattctgaatgaaatatatgcagaacatggaatgttgcatggaaattcccaaaaggctccttaaagagaggctgtatcttaaagataaatgtatttcggttgggagatatagcctactattcttcttttctttctcctctctggaatgtgaatgtgatggctggaactccagcagccatctcgggctatggggtgactttttacaatagaagccagtactgaaaatggtggtgtagaaaaatggaagtctgggttcctgatgatattgtgggggtcctccttatctccaaacttctttgacataagagagaaataaactattttgtttaagccactgttattttggactttgttacatgcagatgaccctgatcctaactgacatattcagataccatgctacaaagaaaaccacaataaatcccaaatggcaaaatttggcaaaattgtagaggtcactttctctgaaaataagataagctagaacataacaaaagaacacattttttaaaacccaaccacttagaatttaaaatgtgttcttctaattgactaaagaggatttgaaattataattccaagcttatttagaaaataacaacataagatcactatatatgaaaacatatcagatatagccatgttttagatatattcagaggcaaattcacagcactaaacactttcattagaaggaaaataaataaactaagcattcaaggcaaaaagtaagaaaaccaaccacaaacaaagaaaggagggaaaaaggatattataaaaacaaaagcataaaagaataattagaatacagaattgataaatacatccaagagctgattccacgacatagctttcacaaatcaatcaattgtgcagtggcacaatcaaaactcactgaagcctcaaactcctcagctcaagtaatcctcccacctcagcctcctgagtaactgagaccacaggcgcacaccaccatgcctggctaatttttaaacttttttgtagagatgggatctccctatgttgcccagactggtctcaaactcctgggctcaagcaatcctcccaccttggcctcccaaagtactgggattacacgtgtgagccaccactcctggcctcagttattttaataaaggagatggaggtgtggagtggaaaaagactcaaatcaatcaaaagagagatcattatatttaaagacatcaatatttaaaacttttctataacaaagacaccagagaataagggagaaacagctggagaagagacgtgccatatatataatccaaaggattaatgtccaaaatacataaagagctcttacaaatcaactagaaaaatatggcccatggaagaatggacaaagagtgtgaacaggtaattcagagaagggggaatacaaatcaccaataaatagatttaaaaagcaccaacatctttttggtgtttatggaaacaaaaatttaaagtataatgagaatctaccccttctcccatcagattggcaaaaacgttaaaaagatgaatgaatactagtgttacaaaagcatggagaaatatagtctttttgaagggaaattcagccatatctgttaaagatgtaaatgtgtgtagctttttatgcagcaaattcactttctggaagtgcccttgagaaacccttatccttgtgcaaaaatggctttacaaagatttttcacagcacaatcgtttctaatagcaaataatcggacataacctcaacccatcacactggaggagagggtgccattcagcagagaaaacaaacaaataaataaatgaagccaattgttatggaggcaaactgctaagtgtcataagctaaccatagataaataagtatattgttatattttaatggaaaactccacaaaacaaaaaaacactttaaatgacttaaatgtatgcagatatctagaaaaagcctagaggcacacaccaaacttcttacaggggttactctgggcagagattcggggttgaggagcatcacaaggacctctacttttggttgtattgtttaaattctgagctgagagaacattcatgtattacttgtataacttttaaaatattctttataaaacattcttggtggtatttttgaatcccaaagaacatattcatgtattacttgtataattttataaaatatacagagaagatttttttttaaatcctaggagatatttctgaactccaaagataaagagaaaaaatatcaaacgattccaggggaagggggaagtttacctagaaaggaaaagaaaatcaggccaactattgttcatgtatgaaagagaaaaaaagatctccagatatgcaaagattcagaaaggcatattacccctatattctgaatattgttctaaagggtattctagccaaacaacacacacacacacacacacacacacacacacacacacacacacacacacacacagcctaaataattgttaagtataatacaggtgttaagaaaggctttataaatctgatgaaattccagatgatttccaaaaacttggcaggtgtgtggagggaggtaaaatgatcaagtagagagtagagtgaaattacatgctacaggtctcctcctatgtgggtagcgttaggtaagtcatatttattatttgactcttgattataaagtatatataatgcaacctctctgtactataaaatatgacagatgaatggtaagtagagaaaattaggatgctccccttccaaactaaagaaactaaaggacttatcctctagtataaatcaggagaagaagtggaaacaataacaaagcttaataaaaagctaacagccacaagaaaacccatttgacagctgggatatgcagtcataaccatcagtggcagaataaatacgaatgggttccatttctcattaaaattaaaggcagtgtttctcaaactgagttaaatgtaagtagcctttttatgcagcaaaagtagaattcagctatattttgtccaaaagagatgtgtaatacaaaatggcacagaaattaaatgactctgacataaaggtacaggcaatgatatataatgcaagtcatttaagcaaaacaggaataaaaaaattaagagaaaattcaaggcaagaataatcaatgaaacagggatatttcgtgtgtgtgtgtgtgtgtgtgtgtgtgtgtgtgtgtgtttgagagatagagatgatatcaagaagacaaaactgtctgaacacaccaaacaccattgcattgaaatctataagacaaccgcaagaaatgcaaagaaatgaaacacacacttgcacatacacacaattatggtgggaaatttataaacctttctcagaatatttcagaacaatgtagtagtttcagggcaacgacataaaaatagagatgtgaataatacctctctcgatatatttatatatttttaaatatatgtataaaatgaaatatttcaaggatacagaaaagtctagaggataacgagcatccatatatgtccaatcttatttcgtcaatttttttgtgaagatgtttttaaaagatgaaacactataaatacaaatgaagcaccccctgttctcctgctaaatttcattgctttctctccccagaggtaaacagtatcacgaagccggtgcttattgttcccatggatgtttttaaggatgcattaaaaatgtactcataaactatatataatattgctttgcatattttttaacattatataaatgacagagagcattactactctgctactattttttcattcaacattgtttttgagatttatccatattcataaatgtcgcccttgctcattgttttctttcctgtgttaagtattccactgcgtgactaagccatgactgattcattttcttgttgatggaatttcagcggtttccaattttttgctatcataaacattgctgcaaatattttcttttcatatttaaatgtccttttgcatataaggtgatgtagagatctgactttctttcttttccacataggtagccagctgtcccagcaccatataatactattagatggtttgtcctttttctccactgatttgtaatgccaccttagtcaaatcttaaatttccatatgggcatgtctccaggttctctgttctgttccactgacatatttgcttatcactgtaccaaaaccaagttgtcttataatatttggtagggtgagtcctctcccaccaccttattcttgaaaattgtcttcactattcttatcccctagcttgtattcatgtaacttttcatagcaacctgtcaagttccataacaaatcctgatgagattatgactgaaattacattgaatatagattttaatttgaagaaaacaaaatgatacagctctccacttatttagatctccaatgtccttcaataaagttgtatatgtttctctattaaggtcttgaatattgtttcttgaatttatttttatatcccttattgtctaaaatactattgtaaatgacatcttttataaaaatcatattctagatgtttgttttaggtttataggcatacaaaatttttttgtatacttgtcttacatccagaaatcttttaaaatagttccaatagtttgtctattctcataaatgtttttctttctttctttccaactctaataccattgtttattttttcatgtcttactgcacttgctagtcttccaggaaaatgttagatagaagcaacattatcagtcattcttaccctgtccaacacattaagaatttacctttgtttcatctttaagacaggtgcttgctatggttggtttaaatcattttttatagacactatcaagttaagaaagttccttctagacctaatctgttgtttttatcataataattaccgtaaattgagttatgttttattttatcaaatactttttctgtatttactggggaaatcatgtttctccttcagtttctcagtgtgatcaactaatattaatacattctctaatgttatcatatttggtaaaaagcatttcgttatgatgtactttgatgcattgctggaatcagattgctattattttatttcataatttttacatgtaatttcataagtgatattggcttatactttttctttcttatacttactttggtattggtctcaaagtgcctcataaatgaactgggaagatttcctttttttcctctctcttttttgttttttttcaatagagacaaggtcttgctatgttgcccaggctggtctcaaactcctgggctcaagcgattcccctgccttggcctctcaaagtgctgggataagaggcatgaaccactatgcctggcactttttttgcttttgaaagctttataaaattaagttcagctcttcctttgggaacagtcacctggaagatcagagcccagtgataattttgggtttgtttgttctttggtgcaaatattttaaactgcaaattaaatttccttttatttataggtctattcagattttaaggccaggtgtgatggctcatgcctgtaatcccaacactttgggaggctgaggcaggagggatcacttgatcccaggaatttgaggctgcagtgggccatgatcgcatcactgcactccagcctgggagacagagtgataccttgtctccaaaaaagaaaaaaaaaaaaaagactctatatttcgtctttctaggcagttttggtaagctgtattttcccagaaatgtattcatttcttctaagtctttaaatgtattgccttgagttgttcaatgcattctgatcttttattctgctactgcatctataattattgtacttcttattgctaatgctgtttatttgtatcttctctcttttgtcttgatcaatctttctagaaatgtctatttaattagtccttctatagaacctaggaatttaccctgaagatatattccaacaatatcacaagattaccattttggcattattcatgatggcaaagtattacaaataatctaatgtaagaaattatctaaataaatcatggtacttccacttagtagaatactatatagctgtaaaaaagtaataatgaggaagatctctataaatcgatatacagtgattttcaagatatatcaagtggaagagctggggcagtggctcacacctgtaatcccaacactttgggaggctgaggcgagtggatcacttgaggccaggagttcaagactagcctggccaacatggcgaaaccccatctctactaaaaacacaaaaattagccaggtgtggaggtgcatgcctgtaatcccagctattcagaaggctgaggcaggagaatcgcttgaacctggcatccgaggctgcagtgagcagagatcatgccactgcgctccagcctgggagacagagtgagactctgtctaaaacaaacaaacaaacaaacaatgaaaccacaaaaaacagatatactgagcgaaaaaaacattgtgcaaaagggtgtacggatgcttctcaacttatgatgtggttacgcctgataaacccatcataaattgaacatatcgtaagttgaaaatgggcattttgttgacatgatgggatgcggaacatagaaggcaatattcaaaaaaacactggcaacagagtacattgtagtatgggttgtttacccccgtgatcacatggctgactgggagctgcactgcccagcatggtgaaagtatcatatcacatttctctagcctaggaaaggatcaaaattcaaaactgcaagtattgttttcagtgaatgtatactgctgtcacatatgataaagtcaaataattgtaaattgaaccatcgtacgtcagacacatcggtatatagtatactacattttatataagaaaaaagggggaaagcagatatttgtatctgtttattcttacaaaaaaaataagaaggagaagttgtttacctcagaggatgggtgagaaggaggtagcagggataggaagcggagtggaacttttatgagtgtatctttttaatagctttgacttttaaactattcccctctcctaaatatcaaaaaaagtaaattaataagaatggagaaacaactaaaatggaatgccaacagaaatcagttaaacctaactgtgtatcaagtagataacataaacacataagaaaaaaattaattcaagaaacttttgaacatggttctctgtgtactctcaataggatactttctaaggacaaaaagaacttcaaagaaatcttgggctttagttactacgtattttgagagtggtattgatgtagcaattctgaaaactcttatttgtatgtataagatttagcaagtgagtacatatactgttggagtctcattcagggagaagggacattcaaatatgaaacgggagaacaaatgaacatcgagatgtttgatgggaattacaggtatcagtataaactcatgaatttttacaagttgtatctcctagctctgtcccccaagagtacctagaagcaatgccactccagtaaccatgagtacacccagcatcaagatcttggtttctaagtatcatttccctctaaaaggaaatagggctccttggagaaatcaattattctaggatgggggtgaagagagtactgtacagacaaatctactgtaatctcagcactttaggaggctgaggtgggaagactgctttcagttaggagttcaagacaagcctgggcaacataatgagactctatctctataaaaaaatttttgagaagttagctgggcattgtggcacatgtctgtagccctagctactcgggaggctgaggcaagaggatcacttgagcccaggagtttgaggctccagtgagccatgatcctgccactgcactccagcctgggtgacagtgagacaaaataaaagaaaaaagaaagaaaaaggaaggaaggaaggaaaacagaaaaggaagaaaaggaaaggagaaaggaaaagaaaaaaaaaagagaaagagaaaagatgaacctagaatatcctgttgtgtcagagagtactgaagctctcaaagactagcggggcatgtcaaatagagaaactgctttaaggttgggtcaaaagtggccccatttgcatatcaaaataaataatgacaagagtacatttttacccactgaataaaaaaaaccacaaagactgtattaacagtatctaaatactgatagttttaagaaaacattaaagaaagaggcagaagggaaactcgagaggatgccaactaattaacatagaaggaatagtatctatgatatccataggaaaatttgagactatgcaaatattctgttctcaattagttttttacccaatagttttaacatctgttggtcattcttgtctgcttccagttttagactaatgtgaaaaatgctactataaacattcacatacagatctttgtgtaaacaaacatattcatttatcttggataaatacctaaaatagtgttatgtggtcatatagtaagtgcatcttcagctttataagaaactgcaatacagtttacacaccacctgctgcaacccaggatccattctcagatcacacattgcatttattatagttgttacctgttttaatttagcttcctaggtctatatccaagaggaatgagggcatatatccactaaaagacttgtacaagtatgttcaaaacagcactatttgttgtaaacccaaaactagaaaaacccaaatgttcaccaacagtagtatgaataaagaaattctgataatttatgacaatggaatattatacagcaaacagaaaagaacaaacgaatgttacagataacaatatgaacaaatctcacaatgtggagtaaaagaagccagacacaaaagagcacatgttgatgattacatttatatcaagttcaataacaagcaaaactaaaatataaaagtcagaaaagtgattttctgtcggggtggtgattgggaaggacacatgtgaggtttctgagatgctaatgatgctctgaatctttatctaagtgagctggccgaagtagctcagttgggagggtgttatactgattccttacctaagtgatgtttactggatatgcttgcttttcttttttttttttctttttttttttttttgagaccgagtctcgctctgttgcccagcctggagtgcactggcgcgatctcggctcactgaaagctccgcctcccgggttcatgtcattctcctgcctcagccttccgagtagctgggactacaggtgcccgccaccactctcagctaattttttgtatttttagtagagacggggtttcactgtgttggccaggatggtctcgatcttctgacctcatgatctgcctgccttggcctcccaaagtgctgggattacaggcgtgagccaccgcgcccagccctggatatgcttgctttttgaaaatttaccaagctgtacatttatgatgaatgcacctttctgtatgttttattccaataaaaataaggagtaaacataatcctgattctaaaactgaacaaaaagaatgctgaaaattctttctgaattaattttaaactttgatttttcagaaggcatgcttctactcctacttcccaagttctttgagaaaacttccctatgactagcaggtgctaatgacaacagtggggacagaaaacgtgcagggaagaaggcaattttcaactcaacgctggatttaagtcatcaggctttttatgaaaagaggtttgccaatcagcatcaagagatgtggtaagaaatacatatcattttatttggtaatttccctccaggaattgacttatcctaaatcaacaattcagtcaaatacccgtgagcaataacataaagttagacatttaaaataattttttagaaaaggaaatcctttgaaggtaacacttacaattggcgtcccaaaaggaatataacctgtgaacgagaagaaaagagtcaggccttataatccactcacatctcacctgagatacccaggagcctccgggttaggtcttaggctatcagtggccctgatgaaggggctcaggtcagttaggcgggaggcatctcctatctcatagaccctttcccagttcagccctcaccggggctgtgtccccagcctcctcttctctgctcccctttggccaggcagctttcactctcccctggaacccagaggcctgttcctgcaggcagggctgcctgcgacctggggcaccaccactccacacttggtgatcctcctacgatttcctgcgaggcacgacacaccctgcccacgctcactacatgaggctgaacatcctccaaggaccccagaatgtcttccttcttgcctcagcttgtctttctaacacaggcccttacttccccggcatcatggccatttctggaaagaaaattccctcccaaactgagccatgcacctctaagtgccagagcttcttaaatccgtggcatccccagtggcgcagtagggagctggggtgaagcgcagccaggctgtgagtacagcctcctcgctgctctcagcccccaggcgaggctctctccacagccccaactgctgtcagtggacagcctcctgtccccaacctctaaccgtggcagccagtgagcagtggctggacagcgggatcgggcttatctgacttgcatctaaagtaaagctttgctcctgagtgcacataatcacacacacacgtgagccatggttctcatacccacttctctctggggagagaaccagagtttgatcagggcctcagaggaatgcatgactcaaaaaggtcaagaattacaagagaagccaggctcagggtgagagcctgctgtgccgggtgcagggactgggaagcatctacaaccacaactgtaagatgctcagagcccttcccagcactttgggaggccaaagcaggcggatcacttgaggtcaggagttctagaccagcctggccaacatgatgaaaccccatctctactaaaaaatacaaaaattagccaggtgtggtagtgtgtgcctgcagtcccagctactcgggaggctgaggcaggagaatcgcttgaatctgggaggtggaggttgcaatgagcagagatcatgctactgcactccagcctgggcaaaagagggagactctgtctcaaataaaaagaaagaaaaatgctcagagccttaaagttcttcacggcaaagccagggggtcacagggcactcactgccccagtttacacaatgacatcacatgtccatcaacttcctggttgtttattttcttgccctcagtgaggccaggctctctgggggtggcgaccctgagggacccatttgactgagaccgcctttctccagccacccgaggccttcccaaggcagcagcagcagtgccctcccattccaccctcataattcaaggtggctgtgccccattgcactgagaaatggcaagaaggaggcgtcagcacacccatgagtgtgactctgcagagtctctcacaactgctggggggataagcatgccagcctagctcgtgtacatgccagtgctttctaagccctaaagcccacataggcacagctgccccttcagtgaccagtgggatttcctggggcagggatcttgtatcaccctctgcctcctggtctccacagaacaggaatcccaccttctgtatgtgcacagcagtgcaacaacagtgcatccattctgaagggagggctaatggcaggatcagagaacagagaattaggctggagactgactgcctaaaaggggcagggcagggagcaggacttggaaggaaacagcaggtcacacaccggtgagagggggaatgacttgcagaagccagggcttgcttacagcaggcatcactgaggctgtcctagtgtgcgctgagtgatgtggagtgggtggtggtgggggctaccagattcacctgtggaagccctggttccaccccaactgctcaggcagaaaaggcaggtaagctccatagagtattctgaggcctggccagcgccttgtacagttgagctgaggtgaatgtagaggtgcaaatatggccatgattgtaacaggctctgtcccctccttaggccagcacatctggatgctcctggaactgtgactggagtaagcaccccaggctgaccagaaccagaagggccccaggagcttacctgacattctaaatggcatgaagatcttctcattggtgtccggatgtagaatagcctggcaaaagcaggaacagagaatggggtggggacgggggtgtagggagggggaagggggaagggggagggaggagggagaaaagcagaggcattaggggaggaagaagggaagaagacaacttctctgggaagattcagataccagtggctgtatgttgccttgtggccagttaggcctttccaccactcaaggcaaaagaataccaaaccatgggccataaacagatagcaccactcctcctgacttaccctaaaagctgaatgcagtggagagcaaaagtccatggggaacgggatcgtgtctaccttgcaggccctctacccccattcctggcacatggtaggtacataataaggattttgtggacagagccctgtctcttctgggagctcagagaacccagggaaaggccagcctggcctgagctccagacttcagagactctggcccttgagtgtcggggcagaaggaaggggtgagggggccaagggcaaatgtgagagcccgaagagccaccggaggggggcttccactagatccctgggacagggcagggtggagtccaggacaacacggagaaggaaatagagaatccaaaactggattacctgcttgattttctgtgcactccagagctggaagagagataaaggaaaagaaaataaagaacaaaaattaaaagcatatatcggtttaaggcttccaacccatgttttctaaccaagggatccagctccgaaagcccgaaagaagctcgggctatccttgccagcccaggctgggcagctgtcctatcctggggggggtgacatcagagagtaagggccagagaggtcccagaatggcagagctaggggaccttgcgcatcaattaagccaggaattctcaactatgtctgcactttagaattccttggagaattttttcagcattttcctaaagctccctagttgactctaagtcataagcaggtagaaacctctaatttaaatgaagatacttcaattgtctcccagaatcactagtgacagcataatataattttttcagagatagcctggattccctgctgtgccacttctacctctgagcctcagtttcctcatctgtggaatgggcatgatagccatgcctctgacacagagtcgtttaaggggtgaatgggaagctctcagagcaatgtcagcacaatagcatgtgcttataagtgcttactgttgctgacattatgcctgttgttatcataagaaggctgtagggagaaaaagttcctttcaaatgctgatgaggctgtctctttccagcacagagacaggctggagaaacggagtaacttgtcaatcccttcaaatgacctaaatactgtattgcattgaatctaagacaccactgatcctaagatatactatcatgtgccgcatacgaaagaaaactatgactgtaataccaagacccccatcaattaaaagactcatttcattttacagatgtgataaagtaggccttttttttttttcactgcaacctctgtctcccgggttcaagcgattctcccgcctcagcctcctgagtagctgggattacaggcgcgcaccaccatgcccagctaatttttgtatttttagtagagacggggtttcaccatgttggtaaggctggtcttgaactcctgacctcgtgatctgcccacctcggcctcccaaggtgctgagattacaggtgtgagccaccatgcccagcccaggccttttcaaatcaaggaaacatggcaaataaaaatttacactgtcggggggccaggcacagtggctcacacctgtagtcccaacactttaggaggccaaagcaggaggattgctgagcccaggatcagtccaccctgggcaacaaagggagaccccatctctacaaaaaatcttaaaaattagcagggcgtggtggaatgtgcctgcagacccagctattcagtgggctgaggtgggaggaacacttgtgcccaggaggtagaggctgcagtgaaccatgattgtgccacagcacgccagcttggatgacagcgtgagaacctgtctccaaaaaagaaaaaaaaaggacaccatgggcaaaccaaaggccagtatatttttttaatggagaaagaaggctatgcggctagaaggaagatacagccagcagctgatgttaaagttttataatagaatggttgttatgcttcatgtatatggcaatgttggtcatctggaacataaattaagctgcagaagttaagaaggctactgggtagtaaaaatagaagttataaaattgatacattaaagtttatgcatttttctcacagctgagtccctcaaaccttacttcacagcctaattaactcttattttagacacatttccaacacacttgattgtctgctattccagacccaggcagattagaagcagtcgatgtttaaaaaataataattggggaacagaggggactgatgagtgaaaagccaaaagcagaatcactgctagcacaaaggttaagtgagggcctaacagcaaagaggttatttaaaaacaacaacaacaacaaaaaaaaacataaaaggctgatcgtcccctctttgctcagtaagcaccttcctgaagtgcaccctcaagtctgggctctgtccctggtgcgaccccaggccctgtacacagactcctgacaccccacaccctccaccccagtcgtaaccttctgcatcctcccacctctggattcacagtcaggccactcacaggcaggaactggcttttcagcactatctcctagcacattccatccccccagggcctggaacacagtaggtgctcaatacgtgcttaatgaaggaatatcatcttctaaaacagaagtatacctagacttaagttgacttctggtaaggcacggtgaagccaatgcacagtgtcatctccttttcttcccaaatcctcgagaaaagaacagcaaaggaataaaccagctgaaaaccctctcggggaggaaggggacgtgacagcaggcagaagatgtcacacatctttgaaaggtggtgagctgatgaagagatgagcggttggcaatgctgcagagggtggaaggacaccccacatgctcagtgggagtgagtgggctcagcccaactagagctccagacaccaggaaggtgcaggcggcatggccagagatcagggagagacgttgaaaatgtccctgtgcacaaagtagggaggcccaaagtccccatccaggtgatggaggtttattctccagagaagctaaatcacaacagcccagacatggtcacaggcacagggggaccaggcaagggtctgagtgctgaggctctaaaggagcccgtctgcatccagctctgaggacaccacaggcaggaggatggagacaccttctccaggaaaacagaaaggctcccagagaaatgacccacaagagggctggattcgtggacaggccatcagcgcaatgctgagaaggaggtcccattccagtggtctaatgctgtgtggctgctttttttttttctttttttgagacagagtcttgctctgtcgcccaggctggagtgcagtggtgtgatcttggcccactgcaaactccacctcccaggttcaagtgattcttgtgcctcagcctccccagtagctgggattacaggcgtgcgccaccatgcctggctaattttttttttttttttagtagaggcggggtttcaccatgttggccaggctggtcttgaactcctggcctcaagtgatccacttgcctcggcctcccaaactgctgggattacacctcgcccaacatggttgctgccttgactttaatacaggcattgccacctaaggacattttggtcaatgacaaaccacatatacaatagtggttccataagattacaagagaggtgaaaaattcctatggcctagtgaccttgtggctgtcctaaagtaatagtacaatgcattactcacatttgtggtaatactggtgtaaaccaacctactgcattgccattcatataaaagcctagcacaacacctgacaataataaacgttactcatttatatgtttagtatgccatacttcttattattttattttatttatttatttattattattatttttgagatggagtttcactcttgttgcccaggctggagtgcaatggcacggtcttggctcactgcaacctccacctcccaggttcaagcgattctcctgcctcagcctcccgagtagctgggattacaggcacccaccaccatgtccagctaatttttgtatttttagtagagatggagttcaccatgttggccagctggtctcaaactcctgatctcaggtgatccgcctgcctcagcctcccaaaatgctgggattacaggcgtgagccaccgtgcccagccacttcttattattttagagtgtataccttctatttatatttaaaaaaaaaaagttaactgttaaacagcctcaggcaggcccttcagggggtattccagaaagaggcatacttatcataggagatgacagtcccggcgtgttactgtccctgaagactttccagtgggaaaagatgtaaaagacagtgatattgatgatcctgactccatgtaggcctagaatgatatgggtgtttgtgtcttactttttaacaaaaacgtttagaaagttttttaaaaaagtaaaaatgtttaaaaataggaaagagcttatagacaagaatttttttgtacagttgtacagtgtttgtgttttaagctaagtgttattacaaaatagtcaaaaagtttttaaaatgtacaagtttatgaagtagagctacagtaagctaaggttaatttattttgaagagagagcattttttaaataaatttagtgcagcctaaggatatgtgtttataaagcctacagtagtgcacagtcatgtcctgggccttcacattcactgaccactcactcactcactcagagcaacttccagtcctgcaagctccattgatggtaagtgttctatgaaggtgtatcattttttatcttttttttttctttttttagacagggcttgctctgtcgcccaggctggagtgcagtggtatcatcacagctcactacagcctccacctctccggctcaagcaatcctcccacctcagcctcctgagtagctgggactacaggcgtgtgccaccacacttggctaactttttgtgtgcttttgtagaaacgtggtctccctatgttgcccaggctggtctccaactcctgggctcaagcaatcctcccacttccacctcccaaagtgtcagggttacaagcatgagccaccgtgcctggccccatctttttaatcttttatgccatatttttactgtaccttgtctatgtttagatacacaaataccatgtgttccaattgcctacagtattcagtagagtaccatgctgtacaggtttgtagcctaggagcaataggctataccatacagcctaggtgtggagtagactctaccatctaggtttgtgtaagtgcactctatgatgttcccgtaatgacaaaatcacctaatgtcgtatttctcggacatatccctgatgttaagtgaggcatgactgtatctttatctttgaatttgagttttataagttaagcccaatgggagaatggagcacatgctggcggcccggaccctcagctcacatgtggtcctgcctcccactgcctcagccaccgccatgaaatgagttcttggccacccagtgactgctgcaaccctccactcctgtcagaggcctgggcgcagggagggccatgcagtccccatgcatcaagttgtgaggcaggactccgggtgcctgtgagggtctgcacttgtcccatgagtgtcccctgtggctaaggaagagaaacattaaatagcaaataaaaaacatttttccaggacgagagaagaatgaggggagagagaaaactcagaaaggaaggaaaagcttctttctgttttttgaacaagggtcttgcatttctattttgtattgagtctcacaaatgatacggtcagctctgcctagaaatactgatatttggaggaccccagtgaaacagatcattgctcagtgagcctacacatgcatacataggaaagaaattctgaggaaaggagacaatgcaggaactaaagaacattttaaaaacactctagcatcttcagagcagaaagacatgaaagaggaacaggatacaatgaaaaagagggaggggacaaaccctggctctgtcgcttactccatgtgtggccccggggaaatcactttgcctctgtgcctggttctccatcagtaacatgagtcgttgtaagggagggttccctggcagtctgcatttatgggcacacagctaagcctatgattcccagcctcccccgcagtcaagtggcctcctgggaccgggtgctggctaatggattgtgggtggaaatgacgttcgccagttccaggcctgtccccgagcctcccacggagaatccagtggaggatagtgaggccctaaagacatgagtgaaaggaggcatcctggcatcatctttggcctctgccaagtccctgagttgcaacggagtcagatatgaatgagaaacacacctgactgtgttcagcctccgaaacctgggcgttacttgtactaacatttggctcaatctgactaacaccaagcgttaaatgacatatgcatatataaaatatttgactcatagaacgtgctcaatagttttgcctaaaatagagggaagcaattcaaatgagcagttttttttttaaaggatttaatcatctttcaaagtaacttcatctctattgttttatcccccaaatgcctgggaggtagacagatgctctttagactaggtaaggcatctcagagagactaagtgactaagccagggccccaggggctggtggcaagatggagacaggcacccaggcctcctcacctaggtctccccggcactggagcatgtcagtgtctgaggttggccagaatgacttattcacttatttaattccctcaacagccctaggaggttgggattaatatatctcccatttttacaaatgtggaaactgaggctcagagagattaagtgacttgcccaaagtcccacagcaggctgggtgtggtggctcagacctgtgatctcagcactctgggaggctgaggcaggcaaactgcttgagctcaggagtttgagaacagcctgggcaacatggcgaaatcccatctctagaaaaaatacaaaaattagccaggcgcagtggtgcacacctgtagtcccagctacttgggaggctgaggaaggagaatcgcctgagcccaggaagcagaggctgcagtgagctgagatcacaccattgccctccatcctaggcgacaggagtgaaaccctgttcaaaataaaacaaaacaaacaaaaaaaccctaaaatcaaacaaacgaacaaaaaaaaacaaaaacaaaaacaaaaaagtctcacagcaccgggatgtgaacccaagcagtctggctccagagtccctatccttaactaccacttgcatccatctctaaagtctagctcatcactgcactgttctgccccttaggcttgtcatatattttggagatctttccatatcagtgcacagaaagcagtcttattcttccgaccaaaacccttgaatgaatgaaaaatatatatgtatatatatacacatatatttgttgttgttgttgtagaaacgggatctcgctatgttgaccaggctggtcatgaactcctggcctcaagcaatcctcctacccaaagggctgggattacaggcatgagccaccgtgcccagcctgaatattttataaaatgtctcctattgatagacatttggcattaagtacattcaaatcgtgggcagccatcgccatcatccatctccaaaacactgccagcttcccaacctgaaactctctacccattaaatgtgacctccccattcctcccttctccagctcctggaaaccgcgtctgctttctgtctccacgacattcactacactaggtatctcatacaagtggaatcacatagtatttattcttttgtgactgtcttatctttctgctattacaaatcatgttctggtgaatttcactggagttactatattgtgagaatttaaagaaaaaggataaattatacagatatatctggcataatacagaggaaccaacaattagggagggaaagtgggcaactgggggagagaaaaagggagagttttttaaaaattcctattctttttatacctttagaattctgtatcttgttcatatattacctcctcaaaaatatttgtttaaaaattaaaggtaaccactagaaaaagataatagaagatgcacaaattccaagccctttattgacccttatggcacagaccacaaactgtccaataaaatccatgtcctattgtgttgtccatagtcatagaacagaagctggcaggtggctggcctgctacacatttcccagcctcctctgcaatgaggcttgtccatgtagctgagacccacagtggcatctgaggggaagtgatgtgccttttccaggccagtggctccccctccatgctttctgtccccttgctgtgagccagtgcaaggatgtggctgcagcccagcctcagccatgaagatagcacgacgcccaaagagatggtagagaaacatgatggaaggagcctgggtccctgaataatcctgtggggcagagctagctgcccacctggaacttgagctgttatacaggacagaaataaactgtctcatttaagctagtacatttggggatcgttttgttacagcagctagtaccactttaactaatataacccatttggggttattggaaactgcttccagtgatatcagggaaagatttccagggaagaaaggaaggaatggaagctaaagtggtgcttgaagctcttcttgaggcatctgacaacacaccagactcagaggttttggggtgagttgggaggaacatctccattttcaacaaaaattcctagtcatgatctgatcttgtttgggctgatcccatcaccaggctgcagtgacaacagtcaggatcatggactttggccctctctcagtcactaacttacatagcctgcctgtgcaagttacctcacagcttggacttgtattatttttaaaattaggcagaagcagggacaggaggtagaagcaagtctctccagggccccttcctgtcctacggtgtatgaggccacgcccagcttagagggagaacaggacaaggactcaggtctgactccttgggtctaggcttttccctaggacctgctggattaaatgttgactttaaggggttaaatgtcagatgcaaaaatggcagcaggtaatgtaccacccacaagccaagagctggttgctagtttgaagtttcacaagccagtcctgcaaacaggtgatgggggaggatcatcctagggtgtcaagagttcgacgggacatcctaggatatcaagagttcaacgtcttctcactagaccactgaagcatctccactttaaactacaattcctgcttaagacctcatcttgtgtgggctcagcccatctcctctgtgcctctgctgagcataaaaatatgcagctttgatcccttgggacttactggctccaacaacaaatcagtgtggatatgagactttgaaccttgcttgatttctcaacttggtaaataagaacatggagcaggtgtggagaagcaatccgggtgagaggtggctggaagatcccagaagttggctaatttcaaaaacagccagcatctcagctgaagtgccatctgaacctacctgaagttcggtgtagagtccaagggaggggcagaggacactcaccaactggccttctcgggcagagcggggcacacccccaacacccagagggaggaggaacagcccagccccacccccaatctggctcgctccccttcccctctgcctccttccaagctgcttctccaaacctcccaaggcagcaaagacagagcctatttaaaacaacctccagaaggtaattaaacagagcctgaaggggatccttctgtaaggcaaagaatgcctccataaaacaaacaaaaaaaacttcctaatttatcagttgggccaatcgcattatacctcaccattaattttgttgccatggttactcccaggtaatatgtacctattgcaagtctatgtcaggtgagggtacccccaattctacagactcacgaaagaagagggactcttcgcctagttctgcagcatagcacacagcagcagttgcaacttccctatacacgcagtttgtttctatccagacctgggtttaaattctagatctcccgcttgctggctatgtgatttagggcaatacgcttaatctttctgagcctcctcttcctcatttgtaatatgaggatgtgaatattttcaaggttattgtgaaaattaataattaatttaacaaatttacttatttaacaaatatttattgagcatctactatgtgctgaacactgctctaggtgctaaggacacatcagtgacaaaaacaggccaaaatctctgcttttgttgagtttagagggttgcacagacagacaaacgataagcaacacaaacaataaataagcacattttctgatatgttagaaggaaaagtgcttcaggaaactagggaaaatagaccaggacaagaggatagcaagtgtgagcaggtggcagagatggagattacagacataagtaagatagtcagggtgggtctcactgaggtgatattggaggaaacacttgaaggagagaatgagtcatgcagctatctagtgggagattgctctggtagacagaacagccagtgcaaaggccctgaggcagaagtgggcctgtctggtatgtttgagagacagcaaggagaccagtgtgactgcagtggaccaaataggggagagcagtaggagacaagatcagagaggactgggggctttgcaggccaggttaaggactatggcttttactctaagtgcaaaagaggaacactatagtttctattagagcagtggttctcaactaggaggtggattttgcacccaggggacatttggcaacatcagaaaacatttttgattgtcatgactggggaggggaagctaatggcatctactgggtcacagccaggcaggttgctaaacaccctcagtacactggacagccctcgcaaaaaagaataatctggctccaaatgccaatcgtgccaagtctgagaaaccctggagcagaggaacaaacaatgtcctgtataatttcacaggtcactctgtgtgctgtatcagcaatggacagaggagcccaggtagtataggcagatcatccaggaggccactgcagggacccagcccacaaatgcatctacagcactcagtacgacacctagcacatcatacaaatgactcacctcctactgatcacttgcctgttctgtgctaccagttagggccatgctgggcctggcccagaggggcagggtgctgaccaggatccccagagcttgatgctaggagtcagggtaagactagtgggtcagccaagccttcccttcggcatctgacaaacctgctgacgcccacagaagacttggggcacaagtatttttaagcctgcctctggtatttgctctgttattttcagcaaagcccaaacacagctgaccccattgccttcctgccagagaagacttgcaggatctcttgcatcccagcagctctttctcctaggcaggtcgcagacagaaatccatcctgcatgggggctctgagcaatccatacattcattaccctgggtgcagggtaggcacttaggaaaggttggctggttcccaacctctggggaatgttgaatgatggacaagcccagccactcaggagctacagtggttcccagtaacctgctccccacactccccatcactccagttgcttccgagctgatttccgtaatagcacttattcctccccagtgcactctggcactgccactgactgatcctaccacaataccactgtcgtgctactcccttgctcaatagctttcagtagcttcctcttaccccacacaatgcatccagcatctctgcctggttttcaaagactttctcaatctggcctgtaacctccaacttccttcccagctttctctttcttgtctcttctctctgtctctgtcacttacagaagatgtctctcccattagatctaagaggcccagtgtcagatccctgccccaccacatactagctatgtgaccttaggaaaataatgcaacctctctgagtctcactggaaaattgggttgatacaggtacctactgacaagtttatgtgaagattagctgagataatatgtggaaagcgctagtacttatggtgcaatacctgccacttcgtaagcatgcagcgagcggtggctcaccatggggaggggtcttccatatttagccccacccacctcctccatccacaccaaatcattctggcaaagccccagcatatacaagtgtacagatcagagtcaacattcagaaacttaatggctgtgtctatgcttacatttttgtataccatggttttgtttttttaactgatagctacagtccttattacggttactagctcttcaaattttcacctgctaaacccaaaagttaaattatactcatttttattttgtcctcagaaccagtgattcattggtatcgcaatcttttttttttttttttttttttttgagaccgagtctcactctgtcacccaggctggagtgcagtgctgtgatctcggctcactgcaacctccacctcctgggttcaagcgattctcctgtctcagcctcctgagtagctgggactacaggtgcatgccaccatgcctggctaatttttgtatttttggtagagatggggtttcaccatattggtcaggctggtctcgaactcctgactttaggtgatccacctgtcttggcctcccaaagtgctgggattacaggtgtgagacaccacgcttggctggtatagcaacctttaaacaaggtaacggtccctggaggagagagcagccacccacaacagaagaccaaaccaaggccatcaggagcaaacaaacaatcaatacatttgcgcatacccactggtgaggtgttgtacctggaggtcaggttagatgacaaactgggtaaaaaaagagagtgtcacaagttaaccagcactgcccacaacaccaggacaggcctgcaggcctcaggacccagttgcaggcttctggcccacacacctgcaaaggcatgagagcaggcgcagagcccaggtgcaggtgaggccactgtccagactgagaacaagaaccacccgggccgcttcagatgagcagggccagcctgggccaggaacagtgactgttaactatggattgccaagccccccaagccctgagctgccatgtcaccacttatcccctctgctcctgtgtctgcagaggccagaggaaggtgtagattggctgactgaagcccagggagggaagcatttgtgagagctggtgctgggggagccaggaggctgggggaagggagggagagggaggatctgcctctagggggccatagtggcaggctcacacctagagcactgtgctacccagccaccagatggacactgcaggcatcaccaacatgagccagaatcgggaagcacagttagtgccaagctgcccctccacccagttcccctcctcctcagctcccttgaggcacatgggggctttcaggacagaaaacaaaggaggcctgggaaacaggacaggcagcttcaagctactgaagggagcaaagaggaggaaatgtggcttcattccccaaactctgggagctggaaggggtcccaagaggccaacctcagcaagaaaagggcagagcggagcctgggccaggaggaaacacatggtcaggaggccatagaggcaggacccaactctcacaggtctcagaagaacacgaaaagggctggggactgcttcggcctgagtagggtggggtaccaggtcacaccatccaggctcttaggtgctcatggccagagagaagtcccattgctcagggaagaggagatcgcagcctgccctcccggctgacggctgcccatgactcagcacgcagtgcacacgccttcagatgggccccatgtaagcaggcactgcgggtctgtcactctcccagggccctgcacaggggcatctggccaaggtgctgcttccgctcatgcatttgccctctattcccatcaccatgctccagtctagcacattcgcccattccctccttctgtagggtcttgctccctcgatctccagcacagtgtgcacctccttgcctggaccacccccacctgctcttcaccagccctgtcagccctcatatctcaggggagaaatctcttccagatgccctcagtctgggagggtcaccccttccacggctctcccatggtatcatgtgctttcactgtcactgcctggtttctggtggtgtagacaggaacttcatccagcttcctacctgctctatcccccaggccctaccctcgcttctggcccatagagatggatagaagagaaaaaaggtgagaaaacctacgtgtcagcctatgatggctaatatttgactaacagaagttccagaatgagaaaaagtgatgaaagcaattaaaaattttgccagagctgaagacaggagtcttcagattgaaaggggtaatgaagaatccaaaatgataaattttaaaagaaacagcattgtggaatttcagaaacaaatttcacagataaagagaagatcctaaatatttccaaagaaagaaaacagaccgcaaagaatcaggaatgaaacggcatcaggtttttcaacagctatattggaacccagaagaaaatagcgcaatggtcttcaaaaatctgaaggaaaatgattgtcaacctagaattttctcctcagccaaactgtcaattaaggctgagtgcagaattataatttttcagacataaaaagactcaaaactttcttctcatttaccctttttcaggaagctacgagaagaggtgttccaccaaaatgatgaaatataccaagaaaaaggaagacctggaactcggaggtaggccccagaaaggaaaatttcaggaaaacaaaaagaaactcaaagacagaaatcttcagattgcaaggagcactgaaaatacagtcatgcgtcacttaacaacagggatatgttctgagaaatgcatcattaggtgatttcatcattgtgcaaacagcatagagcatccttacacaaacctagatgggcaagcctgcaacacacctaggctacctcgtaggtagagcctactgctccctggttacaagcctgggtagtatgttactgtactgaatatataggcaactataacacaatggtagatatttgtgtatgtaaacggtttgtgtatatttgtgcacagaaacagttcagtaaaaatatggcataaaagataaacaatggtcacctgcatagggcacttaccatgaatggagcttgcaggactggcagttgctgtggtgagtcactgagtgtgtagtgggtgaatgtgaaggcctaggtcattaccgtacagtactatagactttataaacaccatacatttaagcacgctaaatttattttaaaaaaaaattagccaggtgtggtggtgtgttactcaggaggctgaggtgggaggaacacttaagcctgagagtttgaggttatagtgagctacatcgccccactgcactccaggcctgggtgacagagcaagaccttgcctcttaaaaaaatttcttcaataaaatgaaccttagcttactgtatattttttactttataaaattttaaatttcagatttttgactcttttgtaatacttagcttgaaacacaaacacattgtacaaaatatttttctttatatccttattctgtaagttttctattttaaaactttcaacttttttttaactatttaaactcttaaaactaactaaaaactaagacacaaacaaacagactaggcctgcacagggtcaggatcatcaagacatctccaggcaacaggaatttttcagttccattatcatctatttttgagacacagtctcactctgtcgcccaggctggagtgcagtggcgtgatctcgactcactgcaacctccacctcctaggttcaagtgattcccccctcctcagcctcccaagtagctgggattacaaacatgtaccactatgcccggctaatttttgtatttttagtggagacagggtttcttcaggttggccaggatggtctcgaactcctgacctcaagtgatccgcccgccttggcctcccaaagtgctgggattacaggcatgagccaccacgcctggcccccattatcatcttatggaaccactgtcatatatgtgatcccttattgaccaaaatgtctttatgtggtgtatgactgtattgaaaggccgcgggagggtacagtgagagtgagagatggtacaaaggaaagtatgccaatgaaaaatctgaggtggttattaactccagataaaacaaatttgaaaaagagacataatcatgatacaaccagtctgactatgcagtaaatgttatttctataattgtaacgacatgaagactgaatatgtataggccccaaaaccatgataactatttcaagagtgagtatggatggcggaaagaagtgtgtttagaggggtggatgataagagagctgaatcctcaactaccataatagataacccaaaagaactaattgagaaatagcagtgtagataagcatatttgtctgaaagatagaatataaatttctatctgcagaacagcaaaaagtagttgctcctgcggaacaggcatgggaactggggagggatagggaacatatactatttttccttacaagcactattttattttattttattttattttattttattttatttctattaatttttgagacagagtttcgctttgttgcccaggctggagtgcagtggcgcagtctcggctcactgcaacctccatttcccaggttcaagcgattctcctgcctcaacctcatgagtagctgggattacaggcgtccaccaccatgcccggctgattttttgtctttcagtaaagacacggtttcaccacgttgcccaggctggtcttgaactcctgagctcaggcaatctgcctgcctcggcctcccaaagtgctaggattacaggtgtgagccaccgtgcccagccccttacaagcactttagtactatttgacttcttgaattatgcacacatgactttgaaaatgtttaaattaatgtttgaaaaagtttttgaaataaagtttatgaacaaaaagacagactttggcacatgaaccatcagtctctgtaatcattaactactaccttcccttacccctccccaaaacaaaacaccaccttcaacatttcaggtatctctaatttgagttcctacacgatattaaaaaagaataaaacaacagtatcctaatcctaatcctcaacatcctcccccatccttcccacccttaacctgaatttttgaacagtggtatgctggtaaacgtttaataacctgttctctggagaaaaagtcctgatttgtagcatttgccaacttctatggtataaatactcccatcatggctgatttcccactgtgtcatccctgatcgtggaattgggaagagatgcccacaatcagctctcgcaagccagtgcgggccagcttcagcaagcctttggcctttgggccaccctagccttatcagcctccatgcttcccactggacctagagcacaggagagatctgagcatctccaaagagcttttagtccacaggggtatgtaccagcagaagtatatgctggacgaaagaagtggttctggctgcagcgaagggtttgtgaatttctcactttccttcccttccccactggccatgctcccacctcccacagagttacctgttcattggtgacccccgggcgcagggtcccatgcttatagtcctccagcagctgcacagcctctctgagacgtctctgcagaagaaagaaaagagacattgaggggcacagatccagggctcccgcaaatttttcttttgtgggattacatcagtatcaaatactgccagtgcaaggctttgggcctgccctcagttcatgggacacacacaaaatcatatagaaataccacctaaatgttcttactcggcagtttaaaaaatgaagtagagctacatgtgcttccatggtcatctccccaagatattttgttgagtgaaaaagcaaatggccaagcaatatgatgctgtttgttgtaccaaataaacaacacacacatatcaaataatatttcctatgtgaatatttgtatatgtcaaagtatcagaaaagccctagaaggagaacaaccaaactggtggctggggttacctcaggataggaggaaagggccaagacttggcaaggggtgtcacaaggaactttaatcttaatgtaatgttgaaagcttttaggccaggcgcggtggctcacacctgtaatcccagcacttttggaggctgaggcgggaagatcatgaggtcaggagttcgagaccagcctgaccaacatggtgaaaccctgtctctactaaaaatacaaacattagctgggcatggtggtgcatgcctgtaatcccagctactcaggaggctgaggcaggaaaatcacctgaacccaggaggcaggggttgcagtgagcctgggggacagtgcaagactccatctaaaaaagaaaaaaatagaaagcctttataaggaggatttttcctttctctttttcctgagacaacgtcttattttgtcacccaggctggagtgcagtggcacgatctcaacacactgcagcctcaacatcccaggctcaagtgatcctcccacctcagcttcccaagtagctgggattatacacacacgccactgcatctggctaatttattttttgtagagatggggttttgcattgttgctcaggctggtctcaaactcctgggctcaagcgagatctgcctgcctcagcttcccaaagtgctgagactacaggtgtgagccacggtgcccggccaggagaacatatttaagtagcacttatatattttcaacattttaaaaacactggcagagattaacctactaaagtacatatggccagagtaactgatggggagaaagagaaaaaaaggataaaaccgtatgattttttaagtctaaaagctaaagagacagcaacagtaacagaaggtagcctttgtccccaccaaaagacttgtataagaatgttcatagcagcagcatttatatagccccaaactgcaaataattcattgtagaatggataagtaaacagcaatatatgcacactataactattatatagtaattaaaaagtaaactatgggctggacatgatggctcatgcctgtaatcccagcactttgggaggccgagattggtggatcccgcggtcaggagttcaagaccagcctgaccaacatgatgaaaccccgtctctactaaaaatacaaaaattagcagggcatggtggtgcgcacctgtaatcccagctactcaggaggctgaggcaggaaaatcgcttgaacctgggaggtagaggttgcagtgagctgagatcacgccactgcactccagcctgcaagacagagcaagactccatcttaaaaaataaaaaaataaaaaataaaaaaaattagccaggcatggtgccgagtgcctgtagtcccagctactaaggaggctgagatgggaggattgattgagcctgggaggttgaggctacagtgagccgtgtttgcaccaccacactccagcatgggtgacagaatgagaccctatctcaaaaaacaacaggccaggtgcagtggcccacacctgtaatcccaggactttgggaggccaagcaggtggatcacttgaagccaggagtttgagacaaaaccccatctctattaaaaatacaaaaaaattagccaggtgtggtggtgggtgcctgtagtcccagctactcaggaagctaagacacgagggtcatttgaacctggggggcaaaggttgcagtgagctgagatcgcaccactgcactccagcctgggcgacagagtgagcctgtctccaataaataaataaataaacaaataaacaaacagcagcaaaaaacaataaacagacaacagtgatagaaggaagctcgtgtcaaggtccagatgagggacccagacaccaaggaagcccagcatgggggaagaaacccagcgaagctgctgtgttccccttttgatggagagatgagactggctaggcatgagagtgcagagacctcaacataagccccttagtctaaaagaaggatgtagcctcaggaagggccctcagtagggaacacagggttttctgagctggctgccagagtgggaaatgaacagccacctcctgtactatggcagcaggaataactgccaacacaggcaaaccagagaggccaccctcgacccctcaggcctgcatgtgaagcactggcatgtgaaacaccgtggtggccagcactggtgtaagccaggcctggcccgagacagaaccataggcagtcagggggccaggaacacttttcttacttggaatggcctgaaggctgaaaagtactgtccctccccttccaaatatggaagggcctagcagctcctagattccaaagagccccttcccggatacgttcatttccaaagtggagatagctttgtggttgtttttattttttccccattgtacaagttaattcatgctgtttaaagaaaatatcagaacaaaaaatggaaaagtacaaaaagtaatcttaaatctgtaaacatacccctaagataacaactccaaaagtgaggatgattttccttctagacataatacgcttatctacaaaattggattgtgttgtttcaacttgcttaaggtcacacaaataagtgggtgatttagtatttgaaccaagtttagtcagaccctcactctgcacaacccaccacacaccccctcaatgccaccaaagcctcctagtgatgcagcgaggcccccacccttaagcctgcccctccggacctggacaatgaatgctctactttccaacgctgaatggtgaatggccccatgttctcattatttttcccactccagggattctcctgagttcctataacaacctggccagattccatctcacttgacacagtcatcaaagggagccctcctaccaaaagaataaattccaaagagccctcatcttggcaaagggcatgggttgcgggagaacaagatccaaggttcctgcagacaaatctgagggcccaggactgaaggaagctggaacctgcttttctgcctctgagagctacaggctggccttggaccttacgaaacctctgtcaaaggccgaggggctgaggctccaggcctgtaggacaggcaaggccccaggacagctgtctggacagggccctgaggcctggctgttctagtggctggtgtccccacttcagagaaagggcctatatcacagatacctgggaaatgggaggagagtctccctgtttaaactcttcacacgcccctggaccgtgaggctcagcagaagggcccgggtacttgagaggtggtgaaagctgggaggttggtggcagggtgaactccgcaggaagtcttttcaaccagaaacaaacaggcaccagcccctgaacacaaaggctgtgaggggcccggctgtggttagtgggaggacacagcccaggctgctgcttaccaaacactactccatcgccagcctgccagcaagtgtcaccatgagagtccctccatgtatttgagaggggtatggtctccagaagatccctctggaggggcctgcacccaggaggtctgctccagcagcacagaatttgaacagaggagaatcctggccccactggtcctgcctcaaggccccacctgaggggaaagggtgggaagagggcaggataccccgatggaggggaatggggacagagggacaaggaagaaaaagaggcacaaaaaggaaagctgaggaagagtcatcggaagcaaaactcatctcttcttggagagaccaggccctgttcacaggagatatggataagattacccctctgcatgtacacatgctagaaacatgggggccatcccctctctgagaaaactggggccaagagggaaaggtacttccttgcccaaggtcacagagttggtgagtgacacctagaaatcccaggaaacctcaactctagttccaagccatttccttgagacatccacacagaagaacctgctgtactcacgccagcaaccatctcccaaagaaacctcagcaatgcccaaagcccccccagaactgatggcctctgaggcagtgcaccccaagtaaaaaaataaacagcctcttttactctcaaagctgagtccagcgtaacacagaaaaaacgaacacacttagaggaagtaggtacagctgaaacatgggccatttcaggcaaagtagagagtttgggagccccagtggttatagaactaaaagactgtggcggggggtgggggtgaggggatgaactggcagtggggcgtgcaggatggcagggaggttatgttccaccatgtcttgatggttcagtagctgactgttctcactgggccaatcttgcaccactgagggcagggccgtgcatccttaccacagcttgaccattactagagtcgcctccaagcagtgggtctcggaggcccaaggtaatggttatgtgcaggcaaagtcccaagcctttctcttgtcttccctcagccatccccaactccatgttcccacccagcagtcctggaacccccagggttctacctgtctgtgctgcgatgggtccttggctcccatcagccagaagcccaccctatgagatgcccaaagaaggggaaccagggacacgtcgctttccctgccctgacctctagttgccttaggaggccaagtgaggtaaactgatgcagttccagcagcatgacaggcagcctatcccttcagaaaagaaaccgatccacttatcccaagaactttaagcctggctaccctcctcttggaatttactctaaaaagtaaacttagcaaaaactaaaagcgatatgttggccgggtgcagcagctcacgcctgtaatcccagcactttgggaagttgaggcaggcagattacttgaggtcaggagttcgagaccaccctggccaacatggtgaaaccccatctctactgaaaatacaaaacttagccgggcatggtggcacacacctgtagtcccagctactcgggaggctcaggcaggagagtcgcttgaacccggaaagtgaaggccacagtgaaccgagatcacgccactgcactccagcctgggcaatagagtgagactccatctcaaaaaaaaaaaaaaaagtaatatgtctaaggctattttgtccaggaaagcaaaagataggaaacaacctatctgttagaccaaaaagtctaatgggatggttatttatgccacaaaacttgatttttaaaaataataaagacttggtgtagtcccagctacttgtgagggtgaggtgggaggatctcgagcctgggaggctaaggctgcagtgaaccatgatcactgccactgcaccccaaaaactatttttaaagttataaagacttggaaatgaatagaataaaaaaagtgtatgttcagtgtcataattgccaaaatgtatgcagatggacaagaacttgaagtatctaagggtactgacaatggggatgttttaaatttaaaaattccatcaaagattttgaagttacactatccagtgctgtctaaaatacatttttttctttttggttattttttccttttttttttcctacaatacatttaaatggacatctcacttgctgctattgggagtataaatataaaatcttgggccgggtgcggtggctcacacctgtaatcccagcactttgggaggccaaggcaggtggatcatgaggtcaggagttcaagaccagcctggacaacatggtgaaactccatctctacttaaaatacaaaaattagctggacgtggtggcaggcacctgtaatcccagctactcaggaggctgaggcagagaattgcttgaacctgggaggctgcagtaagccaagatcgcaccactgcactccagcctgggtgacagagtgagactccatctcgtaaaaaaaaaaaaaaaaaaaaaaaaaaatatatatatatatatatatatatatatatacacacatatatatatatatataaaatatatatgtgtgtgtatgtatatatatgtgtatatatatgtacatatatatgtgtatatatgtatatatatgtatatatacatgtatatgtgtgtgtgtgtatatacatataaaatcttggtacaggttggtataatttgcaggacaatgatatggtttggctgtgtctctaccaaaatctcaccctaaattataataatccccccatgtcaagggcggggccaggtggagataattgaatcatggggcaatttcccccatactgttctcatagtagtgaataagtctcattagatctgatggttttataaatcagagttcccctgcactagctctcttgcctgccgccatgtaagatgtgactttgctcctcattcaccttctaccatgactgtgaggcctccacagccatgtggaactatgagtccattaaacctctttcctttataattacccagtcttgagtatgtccttattagcagcatgagaacagactaatacagtaaatgtgaaatatttatctaaagtctttcatctggatattcctcttctagaaatttatccaacggaattaaaggaaaaacagtgagatttctgtaagaggatatttattgcaatattatttatgaaaaagaaaccacccaaatggtcaagagtaaataattaatagaataaccatgtgatgaattattatgcagttaaacacattttaaaacatttcatgacatgaaaaactgctcatatactcataggtaaaagtatatacttcaggtatcatgcataccatggatatccattgctatataaccatgtatgacatctatgtatcatgtatatacacgtatcatgcatatgtgcatatgattccttatatatatttatatagagatatagatacgtacatattgtatcagtcatcccagtttttgtttgtttttgagacagagtctctgtcacccaggctggagtgcagtgatgtgatctcggctcactgcaacctccacctcccgagttcaaaattcttgtgcctcagcctcccgagtagctgggattacaggcatgtgccaccacacccagctaatttttgtatttttagtagagacgaggtttcaccatgttgcccaagctgatctcaaactcctgacctcaggtgatccacctgcctcagccttccaaagtattgggattataggcatgagccactgtgcccggccagtcatcccaatattgcacacatacatggaccaaaatgttaatggtgattatttctagcaggttggatgatgagcagtttttattttctttagacttttatatgtcttccagtatttaggaactactaccagtatcacatcacatcaggaagcacacaacgtcagtttcttttcaattgttagggatgctaagtttggtcatctggctaaaaggtgtccactattataagtaacattgcaattaatatccttgtatataaatctcactgtacttctcttaattcctttggataaatttctggaagtgagatttctgaatgaaagacattttaaggttctccattataaaggtaccctttcttctcctttgtaattgctaagtaatctgcagggtgatactttgagagcgaatgagtattcagtttcccaaaaacgttttactctttggaaatagtatttattaatgatcctggacagaatcagttacttcactgagttaccaaaggtaaaaagaagagcttccccattcacatttttagtattactatgttatcttacactaactgtgctgctataacagaatgccacagactagataatttataaagaacagaaatttatttctcacagttctggaagctggaagtccaagatcaagaaccagcatttggtatctggtgagggcatctttctgagggaaggaaggctgtgtactcaacagaacagaacggcaagagggccaaaccctgtgtgaaacctcttttattttttgagatagtgtcttgctctgtcacccagactggagtgcagtggcgtgatcacagttcactgcaacctcgacctcccaggctcaaccgattcgagtagctgggactataggtgcatgccacgacacccagctaatttttgaaaaatttttttaagagttggggtctggccatgttgcccaggctggtctcaaactcctgggctcaagtgattcttgagccttagcctcccaaagtgctgggattacagccgtgagccaccatacccggccaggcctcttttacaagggccttaattccattcatgagggagggaccctcatggcctaattgcctcttaaagatcccacctcttaatactatcacatttgccattaagtttcaacacctgaattttgtatgggacacatttcagccatagcatctcaccctggccccccaaaatttatgtccttctcacaaatattcattccatctcagtagccccaaaagtcagtcattccagcagcaactcaaaagtctgaagtcagagtctcatccagaatcctctaaattaggtatggatgagacccaaaggtgtgattcatcctgaggcaaattttcctccagctgtgagcctgtaaaatcaaacaaggtacaatggtgggacaggcacaagacgaatatttatcttccaaaagggagaaatacgaaaaaaaaaaaaaaaggagtaccaggtcctcagtaaatctaaaatccaacagggcaaacaacattcgatcttgagaatcatctttgattccatgtcctgccttccagacacactggggcaggagttaggcccccaaggccttggacagccccacccccatggctttgccagacagccatgcttcagctctcacacattgaggttgcattcctgcggctttcccaggctggtgctgcatgctggtggctctattgttctggggttgcagagacagccctatccccacaatgccactaagcattcccctggtggaaactgcagtggttccacacctgcagcaactctcttcctgggccccaaggctgtctgcaacattctttgaaatcttggtggaggtagcgccgcagccacagcgcacgcacacacacacacacacacacacacacacccctgcagagttagcaccacatggatgctgccaaggcttacgcttgtgccctctggagcagtggcccaagctgcacctgggtctgcctgagccacagctggggtggctgagaagcaatgtgccagaatacagtgggcagagacaaggggcagtgagccctgaagtcccacagacactctacacgccacccttagaaacttctgcccctaaggccttggcactctgggtctgtgatggatgtggcaacctcaaagatctgaaatgccttcaggggtcattctcgcattgtcttaatgaatagcacctggcttccttctagccatactaatctccttatcaaatggtcacttggccacactgctggtttctcctaaacatgattttttattctttacatggccaggctaagaattttccaaatatgtatgctctgcttcccttttcattataaattctatttttgaattgtttcgctcttcttacgttttactataagcagttaagagaagccatgaagcatcctgaatgctttgctgcttagagatttctgccacataccctagttcattgctctcaagccctgccttccacgaagtcctaggacacaggcataatttggccaagttctttgtcactgtaataagaatggcctttcccccatttccaataccttgttcctcatttctgtttcataccttatcagaagggtcttcactgtcactatcccataagttacttctaaaaggaaggaggctttcccacagctcttctcttctgagccctcatctgaattgcctttattgctctgttcatggcaatgagactttttccagcactttttttttttttttttttgagacggagtcttactctgtcacccaggctggagtgcagtggtgcaatctcagctcactgcaacctctgcttcccgggttcaagcaattctctgcctcagcctcccgagtagctgggattaaaggtgcccatcagcatgcctggctaatttttgtatttttagtagagacagggtttcaccatcttggccaggctggtcttgaactcctgaccttgtgatccacctgcctcggcctcccaaagtgctgggattacaggcgtgagccaccgcccccagccttccagcactcatttcaaaaccattccagcctctaccctttaccaagctccagagctgcttccacatttttaggtatttgttatagcaacaccccacttctgtagtatcaatttctgttgtagtccgtctgtgctgctataacagaataccacaggcgggtaatttacaaagaacagaaatttatttctcacagttctggaggctggaagtccaagatcaaggaaccagcattcagtgtctggtgaggtctgcatccttcagaggggagaaatattgttgtctcacagggaagaaggcagaaaggcaagagaccctagcagctgtgggaagccttttttataaaggttttaatcccagtcacagcctaaccatctcgtaaaggccccacctcttaatactatcacattcaccattatgtatggcgtggacacattcaaaccatagcttatgaactcacggattttttttttaatttaatgtgttacaatccattgctgtttttcttaatgctcaaattgtcccaatgcagccagtggatttcctttcaagccagttcctttgtctccatcattctttgagcacttcctcgctttctgtagcaacacttgcagcctcagacctggaatccaccatttatccaggaagccctcgttcctttttgtgggtagcagtatttagaaaccaagatctgggtgctacatgtgttcatagttactgtggtgtcaaaagttctaggccctttcagaaaacagagccagaaaattagaaaatgtaagagagagagtgtgtgtgtgtgtgtatgcgtgtgtgtgtgtgtgtgtgtgtgtgtgtgtgtgatgagtgcatattggtacctccaattcaaatacaacatcacatagttctttgtcttttcccctactctgtatttgtatctctcatctcccacagtgaaaatgctggttctccccatcagtataattatttattctatcctataatataccccaaatagtttcagattgtgacacgagttctagtattgaattgttattaatactatttcagttagttttctatgcccttcatgatgataatctgtcagccattcatttccttaagtaattactgaattcaggatagcaaatgccttccatcttcggtccataattaagagtaattcagatgttgtacagccttgtctttagagatctagatctaattccctggcctacagagaaggccaaagatttctcccttttgcttctgcaagctcctggtagtttccttcattgaaaataattctgcacacactgcaccctggcaaggagactcatagcccttcaagattcccccacatggccagacacagtggctcatgcctgtaatcccagcactctgggaggccaaggcgggcagatcacttgaggtcaggagttcaagaccagcctggccaacatggcaaaaccccgtctctacaaaaatacaaaaattatccgagcatggtggcatgcacttgtagtcccagctactcaggaggctgaagcacgagaattgcttgagcccaggaggcagaggctgcagtgagccaagatgccaccgcactccagcctgggcaacagagtaagactctgcctcgaaaaaaaaaaaaaggaaaaaaaaatcccccaaatcatctcttgcagagatttcacaaaccaggcatattttgctgacaacttcccaggaattatggtagaaggaataacagcgcaaattcacagctctcacaaaaacagtcagcaacactgatctcaaaagagcccccagccacacctcattgtggcatttctttattggtctttcagctcatctcagtatcatgctctccttcccgctgtttttttcctcctcttccttccctctcctttctccatttaggatcaaaatgcaccattcttctcctctgtcaagcagggcaacctcctcctctgaagctttgttcaaggcattcttagaacaaagacagccttcttcctaagaaaaattacagtgaataaaatttcctctgccttattacacatacaagggttgggatctttttaaagtgaggtcatttataaactacaaagaagtacctgcaaaattccctcaagaggagtttctccattgattcagctaatgtccctcagaaccaggtcaccagatggctcaagctgcctaggatctttctacttctggaccccccagcttccagagccacctcctcaagtcctcacgacctctactgttctctcttcatcacagacaaatgagctcatccaaatttcctccagctaagcagcaaccaccccgtgctccctcccaggacaccagccaagggccctgggaggaaaacagtatttatgagccatggtctgtggactgactccagcattgagggggagcctggccctcccagtgccccacagctcatcgggagggactcagaggcctctaatttcccattgcattgatggagatgaccttgctaaataacctgcctagacgagagccaatgaggagtatggccgctatcttgcttgcccagaggtcccattcatggcccttccagagtttgtggagcctagaagatcttctgttggcagaagctttcaaaaaggccagcaggtagtcctggaaacaatccccaactggggtacagtggggaggagaagtgcagatctttctacaaagtctatctgaatctctgatgacagaaaggaacattgaaatttgaaaaatactctaaaattggagttgccttcattattttctagtcagtaaatatttaagttgccttgatatttaaattaatagttttttttaagtatgaaatttagacaatttactcataggagaaatgggccaaaaatgtacaagaatgttggggtctttcaaaatgcaagagttgaagaataaaattgtggtacaaggaggagagtagtgaaatgaaatgatccgagaatgggaggaggagggactgggaaaagggagcggggaccctcctggcacaggcagcatgctaccctgtagctgctcatccatcaccaaagcccctgcctgttcatggtaatctggcaagcaatgaaatacctccctgcttcccacgtctccctctaccatgtctcaatatgtcttgaagtccaccattagcacctctatcctttaagtctcagctgactcctccatcaaataggtggcatttatgttgggattttaggactgcaaatgtgtctagttttgcagttctggaactttctagaatcacacattaggtgggctagataagtagtttctctagttttgtgctcttgcaactttttatgtaattgcattgattattccttgattacttcttaggagaatccagacagagcccaggtaagcaactaaaatacctatgccctttgtccttctgagatgcagtaggaaaccacctgtcagggtaattcccacatttcatgttactgggctgctcccctggacatgaggggggatggttctaggcccaggtgcccagcaagccttgtgctcctttctatcatggcttttctctcccagagctggtcaactccagggcttaaagcaagtaagccaatgtcagcacagagaagatgtgcagtgaagtgctgcccacgtgacggccagggccaaagctcaggccttctgccgtgtaatctcgggcaagttccctaaactcaagttatttgaacaggaatgcaaatggggtgagaataagggtctggagacaagggtccccgggttcataccctggctccatcacttgccagaaccatatgcatgaggcttaacttccagtctgtccttttctttgtctgtaaaatggaacttataatagcatccacatcttagggctgctttgagttaatctgataagttaatgcatgtaaaatgcttacaaattgccttgttcatagtacttaataaatatttgacattttaggccgggcacggtgactcccgcctataatcccagcaatctggtaggctgagaggggtggatttcttttttttctttttctttttttttttttttttgagacagagtctcactctgttgcccaggctggagcacagtggcacgatctcagcacaatggcacgatctcgcctcactgcaagctccgcctcccaagttcacgccattctcctgcctcagcttcctgagtagctgggactacagacacccactaccacgcctggctaatttttttgtattttcagtagagaccgggtttcaccatgttagccaggatggtctcaatctcctgacctcgttatctgcccgccttggcctcccaaagtgccgggattacaggcgtcggccaccgggccagtgaatgtcttgaggccaggagtttgagacaagctggccaacatggtgaaatccagtctctgctaaaatacaaaaattagccacgcgtgatggtgcatgcctgtaatcccagctactcgggaggctgagtcacgagaatcacttgaacccgggaagtggaggctgcaatgagctgagaacatgccactgcactccagcctgggcaacagagcaagaccttatctcaaaaaataaataaataaaaataaataatatttgacattttatatgtacatatattcctacatacatttgtaaatacatataaaaagtccgtcaaattagcctgttgtggtggcaggtgcctgtaatcccagctaatttggaggctgaggcagaagaatcacttgaacctgggaggcggaggttgcagtgagctgagatcgtgccattacactccagcctgggggacaagagcgagactctgtctcaaaaaaaaaaaagtatgtcaaggccaggcgcagtggcttacgcctgtaaccccagcattttgggaggctgaggtgggtggatcacctgaggttgagagttcaagaccagcctgaccaacatggagaaaccccatctctactaaaaatacaaaattagccgggcatggtggcgcacacctgtaatcccagctacttcgaaggctgaggcaggagaatcgcttgaacctgggaggcagaggttgcggtgagctgggatcacaccattgcactcctatctgggcaacaagagcaaaactccgtctcaaaaaaaaaaaaaaacacaaaaaacaaaaagtctgtcaagacatacttcttagaatggctgaaataaaacaagatttttaaatttgacaatagcaagtgttggtgaggaagtggagcaactggaactctcatacactgctgatggaaatgtaaaatgtacaacgctttgaacaacagtttggcagtttctgataaagttaaacatatatttatcacacttatcataggatccagcaatcccattcttattccttcaagagaaatgaaagcatacatccacacaaagaatgttcatatagttttattcataatagccaaaaaactggaaagaatccaggtgtttatcaacaagtgaatggataaacaaattctggaacatcctttcaatgggacactactcagcagtaagaagggattaactactaatacatgcaatgacacaaatgaatcccaaaagcattttttttttaaaagatagggtctcactctgttactcaggctggagtgcagtggtacaatcatggttcactgcagcctcaacttctcaggctcaagcaatcctcccacctgagcctctcgagtagctgggactacaagcatgcaccaccacactcggataattttttaaaattttgtagagacaagtctcactgtgttgcccaggcaggtctcactatgttgcccaggaggataactcctgcctcagcctcccaaagtgatgagattacaggtgtgagccattgcacccagcctcaaaagcattgtgttaaggtaaagaagccagatacagaagcctgcatactgtaggattccatttatatgacattctggaaacagcaaaacaacagaaacagaaagcagatgattggttgacagggggtgaagacagggaggaattgattataaagaggtatgagagaacatgtagggttatgaaaatgcttcacatcttgattgcccatatggtttgcttctgtgtccccacccaaacctcatctcaaattgtaaaccccataatccccacatgttgagagaggacatggtgggaggtgattgaatgatggggatggttcccccatgctgttctcgtgatagtgagttcccatgagatctgatggtttgtaagtgctcagaagctcctcctccattcctctctctcctgccaccttgtgaagaaggtgcctgcttccccttccaccatatcatttcctaaggcctccccagccatgaggaactgtgagacaattaaaccactttttttattaattacccagtctcgggaatttctttatagcagtatgagaccggactaatacaactgtgatggtggacacacgactgaatatggctgtcaaaacttaaagaactgcacacataagaaaggtaaattataccttaataacctgatgttaaaagccattaacagctgttacctataagaggagggaactaagtagggaggacgattaaaggatacttttttctacttaaacatatttgtactgtttgaacttttctaatgagcaaataacttatgtacttgataataatttcttgaaagttttaaagaataacaataatatctatcttaaagggttgttgtgagatccaaatgatataatgtaaaaagcatacagcacaatgtatcaactcagatacagacagacacacagatacataaacagacagctacaggtagagagaatttgttaccttcctctcacctctcacctcccctattctcttcactcccccatcctcaccctcccttaatgacccacatattctgaaatgacaaggtacaaaggcccaagggccactgaggtgacagccatgacttacctcagtgacaaagagtgtgcgagggtcgatgatatccaagaagtgcctgaagcggccatagaaggacgtctgaagaagaggatgagagagaagagtgaatggatcagctgctgcacacccttctccagacactggagagccccaccctttatgattggggtcccccggtccccaggactcctcgtgtgggtgataaatgccaatgaggcctcagaaatctaaggacagctttcctggggctgagagttttccaaagtcaactcagagagaccactgagatactcaaggacaggcccatctgctcttccaggtgacttccattttcccctctctctcccagtgccctgagatctattctgagcctattaaaagctcccaagcatccctggacatgtaggctgaaggtgaggcctggtccccagccctctcccagcctccctgccttgctcaggaccttgagtgacaaagcatcctgcctacccgccacagggtccctccccaaggtccagctctgcctccaggggggatccccaagggcagctcaagcctaaaagcactgagctcacaatcctcaggccctccttcacccacagccctgtagctgctgaagtgcaggacaaggggcagctcccccaaccttgccccagagcaggggccgtggaaaaggagggctttatgctaagcgcagccacaggcattggagcacaatgaaaggaaaccaagcaacccggctgctgggccttctgccctggggactaagccagctgggcaaagctgagctcaaggggaagacagagggtgccaagctcggggatgaaggggaagctgcaatcgctggggttcatgcctcactacactccgggctctgccccaaattcctccctggagccccacaactctccaagcaccatcctttgcacagtggaggaaacagaagcctccacattccctccccttatttagtaggacaccagaccctgcagccaattcctgttcctttcccttcccaataaggaccctgcaataggctccaggtcacctcaaagtccccccacacaccagttctcatcccacctccatttctctcccaccatggcacccctgcatgaagcaacctctaacccctaatgccacccctacccaggtgctgtctctcacaaaccagatcaagctttggtccattcctaacagaaacagctgcctctctaacctcttataatccacacagcccagaccattttcccattaaagacatacataagggaggctcacaatgctgtcctggcaaaatttcacctctgagaatgtagtctaaggaaacaatccaagatgttcaaagatctggtcaggtgtacataccaaggatattcactgctgcattctttacaaaggtggatggttaaataaatgatggtccattcatatgactgaatactatgcagcctttaaaactatgttttcaaacatttatgacatggaataatgcttaaaattttatgaaatgcatataagcagtgtgattccaactcaataaacaaggggataaacagagctagacagatactaagtgaaaagcaaaaagaccaaatgacatccagatcctggtccactaacagagaccagggttccttaggaaaggagcggattcaaaggctggggtagggagggtacaagatgaaactggtacattttgttgcaccaggaagtaatgaagtcttacccccaaaaaatgatggggatatgttaaaaggatcaacgaagggcaggtgggacactgtgttcttccaaatgtgataccccgagaagtccacagcatcactcacataatattccaaagggactaaataaatctaatcacaagaaaacaacacaaacccacactgacagacattccataaattaattggttttgttcatcaaatatgtcaatgtcataaagacaaagaaagagtgggaatgagactgttccacattaaagaaactaaagagacaactagatgcactgtgtaactcgggattggatcctggcgtagaggggggaatgctctcaagagcattactgagacaagtgacaaaagtggaatatggaccataggttaataaaagtgttgtatccatgttaagtctcctgaatataattactacactgcggttatataagagaatgtccttgttcttttttttttttttttaagacagggtctaactctgttgcccaggctggagtgcagtggcacgatctcagctcactgcaacctctgcctcccgagttagcaattctcctgcctcagcctcccgagtagctgtgactacaggccagtgacaccacgcccggcttattttttttgtatttttagttgagacagggtttcaccatgttagccaggatggtctcgatctcctgacctcatgatctgcccacctcggcctcccgaagtgctgggattacaggcgtgagccaccgcgcctggccaagaatgtccttgttcttaaaagatatatgctggaccgggcgtggtggctcatgcctgtaatcccagcactctgggagaccaaggcaggcagatcacctgaggtcaggggttcaagaccagcctggccaacatggtgaaaccccgtccatactaaaaatataaaaattagccaggtgtggtagtgcaatcccagctacttgggaggctgaagcaggagaatcgcttgaacctaggaggtggaggttgcagcgagcagagatcgcgccactgcactgcagcctaggcgacagagcaagactctgtctcaaaaaaaaaaaaaaaaaaagtcacatactctgatgtattaggagatgaatgaatacaacctatttgtaaatagttgaagaaaaataacatgtgtaaaaatacagggcagccataaaacctggaaatgtagatactataattgaatgcagattgaagatgtcctaatgataccatgtatatttgctatcttttcagactttatgattacctgtagacaaagagaataataaaggaaatgtgatgttaaaaattggtagatctaggcaaatagcgaagttttccttattcttgcaacctttctgtaagactaaaagtgtttcaaaataaaaaggtaaaaattatattttcaaaaaagctagatgaaaatatactaaaatgctaatagagattgcctctgggtaataggcttatgtatgatttatatttccagatctttaaattgcttttgaaattaaaaaaatcaatattatacctaatatacagaaatgatattacatttaaaaatacatatttagagtaaaatgcaagccagtcacagtggcttgctcctataatcccagctacttgggaggctgaagtgataggatcacttgagcccaggagtttgagatcagcctgggcaacacagtgaaaccccatctctacaaaaaattttaaaaattagccaggcatggtggtatacacctgtagtcccagctacttaggaggctgaggtaggaggaccacttcagcccaggagttcgaggctgcagtgagctatgatcatgccactgcactccagcctgggtgacagagtgagagcctgtctccaaaaataaaataaagtaaaacatgaactgatattttaagtattatacttgattaagagctcctgaaggacatgggctattgaatgttccttccttatcctccctggctcgaagtctccttacatatctggaaggaagggtcttctgccacaggaatccatgagtgggctgatgagcagccaatggcctcaaggcttctgggtggggtagagctgggctgggctttgaagggagggcaggattaggaaagggtaacagtatggcagctagtggtccaaggaggaaagaggatgagcaggggaagaggagagaacctggaagtagaatggcctgagtgaagcaacttcttgaagatggtccagcagaaacttcagcctttgacttgtcctatggtctggcacggtcttcatcctgtcccagccctgccagccttcttgtgtcactttcgaccatagctactgggggagactcccagataaggcattttgctccacagacacctacaaactcctaatgagctaggctcaggggacagacaccaaatgaacaagccctcaaagagctcacagcccatcaaaacagactaataactataaacaagtaactacaaaacactgatcagagtttaaatgaagcatcgcgaagtatactggggacacacagagttcttcctatgtcttcctagtttaagtcaaggaggtgtcccagaggagctgggaccaagggatggatgagtttacctagcagaggagggtatatgcaagaggatgaaagcataaagcttaggatcagaagctgcaccagactcctgtggtctcttcattcattcatcattcaacccactaccgaggatctactgtgtgcccagcactgtgctaggtcctggaggtagcaaggctgaccgactgtggggaaatgaggaagagcagccacagatgatgcctcactttctagtgagacatgaatgtttgttaaccagaatagggacaggaagaagcatactgattaagtggaaagaagataaaaactctgtattggtcatatcagtctgagatatttaaagggacttccagatataatttttcagcaaacatttggactgagattcaagaaagagactctgaattggaaatgtcaggtacagattgccctaagacccccaccccacccactatagagacaaacctatagtctgaccaagtcagatttactgactcactcaacaaagaaaagcaccacagcagaggaattatggggtgccttgccaaacaaagaaaaatatttggtatataatttaaggaagatagagtaaaatgtaaatgaagcagtgcttcaataggctccaagcaaagcaagactgtgtgaaaaggagtcatcataggtctggaccaaccactcagggtcttgtttccttaaaaactataaagttaagattaatgagaaacgttgtgaccagaaaccccttatttgcagctatgggttgattctccgaggcaaagtgacttagacctgccaatcaagaggtagatggttcattcctaatgatatgacttaaacagcaaagttcctggcagtctaggaccttatagagtgagacatgagtatgaaagaggtggttactggaagaaggttgttcgatactttatagatcctgtgggtcctcgtgagaaacattctttctttgcagctggctctgtgtctgtcctccctgtctgatgaatggcaaggaaggttatactttctcagtctcagttcatttttattttctcaatagttcaaaatgtatagcctccctcccaaattcagctcccatctttacccaatcgcacaatcggtggatgtttttcctcccctttttctttactggaagaatgagtcagccaagtgattccttctctttcccttcataagaaaggtgagtcagctaattctcagcaggagccagggcctacagcagcagctgccttcccacctccaccagccagctctctcccatctgcaagccccccagggaagagcaggccttgggagcagcagcagagggcaaagatcccagaagaagctgacaccgccccgcaactacacacaccagacctccaaattactgctcttcgattaggaataatatactcgctgaacctacagcccaaagcagaaaggctgggccagcccagtagtcctgaatcagctgcaccctgaaccacctgggtacttcaaaaaccaggccatacacccagggattctgattctattgctctgggtgtggcctccaggcatcagtgtctattttaaaacctgcccagtgtgactcttggaaattatgacccctctccactgcacaaaccagcccaggagcagcactagaaaaaactcactgtctcgcctataggaagtaaatgattaaaatatataaccacctgcaaggtactgtgattttagaactttatttcaagcaaactatgagacatatcccccctgcctcccaactctcagcccacacaaatctcccaaccttgaagtgaagaaagcatttgtctgcccagcaagctctccataccccagagggagccctgtgcaaccagcctgctctgccccactaggccttggtccccagcacactcatacccccagtcatctcagcagataagtgagacttccaaaggagcaaggaatttttgttttatttttgagacacagtctcactttgtcacccaggctggagtgcagtggcacgatcatagctcactacaacctccacttcctggactcgggtgattctcccacctcaccctctagagtggctgggactacaagcatgtgtcaccacacctggataatttttatattttttgtagagacggggtttcgccatgttgcctggactggtctcaaacttctgggatcaagcaatctgcccaccttggcctctcaaagtgctggcattacaagcatgagccaccacacctcgccagaagttgttaaaaaacttcttcccttctttctgagacagggtctcactctgttgcccagctggagtgcagttgtgtgatcatagctcactgcagcctcagacttctggactcaagggatcctcctgccccagcctcccaagtagctgggactacaggtgcatgctaccacgccgagctagtttttcaattttttgtagacatggggtctcactatgttgtccaggctggtctcaagctcctggcctcaagcaatcctcctgccttggcctctcgaagtgctgggattacaggcatgagccaactgcacctggacaacaatttttttttttgagatagagtttcgctcttgttgcccaggctggagtgcaatggtgcaatctcggctcactgcaacctctgcctcccgggttcaagcaattctcctgcttcagtcctgagtagctgggattataggcgcctgccaccatgctcacataatttttgtattttgtagagacagggttttgccatgttggccaggctggtcttgaactcctgacctcaagtgatctgcccgccttggcctcccagagtgctgggattacaggcatgagtcactgtgcctggccatgtgggggaatcttgaagggctattttttgtattttttagtagagacaggtttcaccatgttggccaggctgatctcgaactcctgtcatcaagtgatctgcccgccttagcctcccaaagtgctgggattacaagcatgagccaccgcgcctggtcctggacaacaatttatttacagatggactgaaacacaaatgggagaaagtatgtgtgtttgtttcctgtcctggggccccaacatggcaaacatggtgtctgggccggaaggaaaaacagtgagttcaggagaggaaatgaccagaaaaggaagaggaaaggaagcaaagcaggtctcagaggttccctgggtgctgtgctgtcatctcctccctttcactaggcagctggagtagtggttaaatgcatagactttaagtttacaggagaaacaagggataaaggaacatgctaaccactaccacagagatgccatcagcaacattgagaaggtggggaattctacagggacgaacaactgcttcttcaataggaagggaaaaaaggaagacagaactaacagattaaaagatacaaaagaggccgggtgtggtagctcacgcctgtaaccccagcactttgggaggccgaggcgggtggatcacctgaggtcaggagtttgagaccagcctggccaacatggtgaaaccccatctctactaaaaatacaaaaattagcaaggcatggtggcatgcgcccgtaatcccagctactcaggaggctaaggcaggagaatcacttgaacccgggaggcggaggttgcagtgagctgacatcatgccactgcactccagcctgggcgacagagagagactctgtctccaaaaaaaaaaaataaaagatacaaaagagaaatacccaaaggtaataatatgtgggacttatgggatcctgattcaaacaaatcaactacaaataaattaagtgatggtcagggaaatatgaatagcgactggttacttgatgatattaagaattaatgggccaggcatggtggctcatgcctgtaaatcccagcactttgggagggccaggcagaacaatcattagaggccaggggtttgataccagcctcagcaaaatagcaagacacctgtctctacaaaaaaaaagaaaagaaaagaaaaaacagaaagaaaacaaacaaacaaaaaatacatatagccacgcatggtggcacacccctgtagttccagctactctggaggtagaggccagaggattgcttgagcccaggcgctcaaggctgcagtgagccattaattactgttccactgtactctattgtgggtgacagacagaaaccctgtctctaaaaaaaaagaaaaaacaaataatgattttaggtgtgttaaggacatggttatgttaaacaaatcaaaaaaccctccaatatcatgtgataaagagagcatttcacctctgtgatattcttacctcaaaacccaaaagaaagacattaggcaacccaagttgagggacactctataaaatatcttccaaaattgtcaaggtcatcaaaaacaagcaaagtctgagaaactatcccaggtactatgactgccgcagaccagaggaggctaaagagacatgatgactaaatgtaacatgttcctggatgggatcctgggacagaaaggagacattagtgtaaaaaaaagtagtaaaattcaatgaagtctggagtgtagttaacgataatgtaccaatgttagtttcttagttttgaaaaatgtactgtggcaatgcaagatgataacagaggacaatgggtgagggctaggcaggaattgtttgttgtcttttgacttctctaaaattattccaaaataaaaaaatttttaaaaagctaaccaaagagtccttattttttagagatacctactagtgggttcaatgaaatgatgggatgtttggcctttgcttcagagtaattcattgattgggttgtggggggtgggtgcatagatgaaacaaggccggctttaagttggcaactgttgaagctggatgatgggtgcataggggtttactgacaactgtctccagattagtatgtttgtaaacttccataataaaaagttgacaacaaaccaacaaacaaacatgaactctggagacagactgcctgggaatttacttaatctgtttgtgtgctgtagttttcttacccataaattggagatcattgcacctgcttcacagggttgttgtgaaaattcagtaagtcaatacacaaaaaggctggaatgatgcttggctatcgtcaccatcttatggggagaaagatggtcacagaccaccaacactcatcaccctttcttcacactctgaccctccacaccctccaccctctttctgcccgtcctcttgcacagggagacacttgagggaataaagaggagttctagagcgactccagggaataaggaaagaccttggtaacaaatcctgcagaaagcggtgagattaattggggaataagggtcatgtccctggcatgggtgctgggaatgaaccctggattatcaaccaccttgaagcaggcttctgtcaggccagcacaaggtactatgagcatatatattacacaactattacatgccagggcaggacacagagatgtgggctgggccctaaaggagctcatcaacccagtacatatgtagccaacctttgtgtctttagactcacctccttagagacaccccaactctgggatgtctcagcactgatgaaccttacactgtcaaacatgacaccacttgcaattttgtaagatccctaagggacaatttggagaaaagttggtccacctccccagtcacaaccttacaagtcaatttaattcaagtccgcaaagccctactgaattgtctccaggatattcatgtatataacaaatcttcattaagcacctcttaactgccaggcactgtgctgagccttggagagtcaacagggagtaaagacaggcacagcccccacttctgcaaagtccatagtcaacagagagacacagatggcaaagaaatactcatcacaaatcaatgtatacaccgagaaaggtactttgcagtaagcgaacactcaaaaatccaacctgggagtgcaggaggcttctccaagaaagtgatgcttcatggatacaccagggatgaggaagaatgggaacaagagttgggggtagaggaagaggtgatgttccaagcagatggcccagtggtgggagggaacgtggtgggttcagaggctgaaaagcagccagtgtgatgtgaaggagggtgcgaagtgtgggtgggtgggtggtgggattcaaggaagaagtagtcagtggggtgggccatgcatactttgggggccccttcagaagtgaggtctttatctcagaagcaggggaagccattggagggtatttaaatctacaagggcgtagggagtcccttgatcagatctgcactgttgggactctgacttgcagaaagaggaaggactggaagagggccagagtggaagcagggagacctgttgtgaggctactgcagtgacccaggaaatagacgatgggggcttggtctaggattctggcagtagagatgggtggacttgagagctgtgtaagaggtaagatcactgggcctctggttgcatttaaagggtgagggagaagaaggaaagaacacaggcggctcccaggtttctggctgcattgattgggtggcaagttgggctgtttgcagagccagggagccatgcgggaggagcagatatggaggaaagagaagatccttaacatggatgaatcacatgcaacgtgctttatgcaggccactatgctggaggaggggagcttcaaaagtgcatacaacaaacacttttactgccttcaagagcagtgccaaaaagaagtaccgctatggctgcaggaacagggtagcctaaaatgtttatctatggctctagagcagtgctcacagcacagggctcagtcatataagccactaagacgtatttgataaatgtctgttaggtcactgaatgtccctagtgccacatacagataacagacaccaggacaaaaagaaaaagaaaaaaaaaaaggaaacacaaatcttttactcggcacattactatatgcctaacctgtctccatcagggtaagacagaggcagagaagggcaagatcagccccttcttgcaaaaggcctacagggggtttgaggaaaccaagtcgtcacacagcaaacatttagaagaccacagggcagactgtatggagagctatgaggatctgactcaggtggccaaagagatgtgcaggaggaagcctgcgatctgatgggaccagagaagaagggagcaagtgtttgccagagaggcaggcccgactgagcctttaagaacgagcagaatgggggtgggagcggggacaggcaatgtaataaggtcactcaagtccaggcagggacaccccgacactctcgccctagatggcctcctacactggaaggaagatgccagtctcgcctcggatacctacatgctgagatggcctacttttaaaaggaattaaagtcctgttaagaaacactggggacatttttttcagacggctcaggagccaagttccctaattatcagcaaagctcggggcacccccttgctggaaccagtccccttccaccacaacaacaaaaaaagaaaaaaaaagccaccgcaccgaccttagcacaatttcctttcttccttcaaagttcttttctggccgcctcggctgccgcccacccctggcaagccccggttcacttcagcggtctctctgcctgtttcctaataaattccgtctcattggtgcgggaggcgcgggagcccgagggtctgcggcgcgggagcggcccctccccggctccggtctccgggcccaaccaggcgcccgggctccgcgttccacccccgcctccgcagtctagggccgagtcggcgacgccccagaggaggtcccggagggaaaggacccctgtcgccgtgccccgaagagcctgagcgggtgtgcccagagccagtccccggcggcgcgggggcccgggcgcgggagaccctccgcggagaacacagcgaggaagaggctgggggggggttcccaggcggcagcccctcggagggacgacggccccaggggatgacacagcgtttcccccgcacgccctggctgcgtcccctcagggcatcggccggcttgctgcgtcagcgaatcctcagcccgagatggagagcagggacgggggacgccggaccgccgctcgcctcggcactcgccccctcaacctgctgcgcgcgccgagcccggcttgggggccagggctggggagtgaccgcggggcgcgacgctgcccggcggcaccgccagcagctcgaaaggaacgtcagtccccaccgggggaaaaagttagaaggcatcccggccacgccaacttcccatccagggccagactagaactttgcgtcccgggcgggcagctgcacaacccggagcgaccctgagcagccgctcgaagccgggcgctcgggaccttgaccgcagccgccggtggccaatcacagggcgccgcgggcgggaaaggctagagggcgcgggcagtcggggagtgacggcgccaagggccaataggaagccaagatgggagtccgcgcccgccccgttgaccaatgggaaaagggtgactgtgaccgaggttccccccctggcgctagctgcaggctccgctggccgcgggtgggagacccttgggcggaaggggactttggaggggagtttgctcgtcctctctttgccacccgccggcccgcagaccacagcccggtcctcacctgctggaagcggggtttgcccagttggaaaggaggtgcatcgctcgaggcgctagcggcactagccgccgccgccgatgctgtagtcgctgtatccgccatggccactgacgcccgcaatctccggcccttttaaaatgtccctcctcggcccccgccacagctgcctctcccgattggccctaatcaaccgcagcgagcgggaggcgcaaggcgttgtggggagtgtagtttttcgcgtcgcggcgcttacaaccgtagactgcggagagttgcggccgtccggagaggtctcggtgcccgctgtccgcgttgcaaggtgcaaggtcggcagtccaggaaaggtgttcctgtacgacgaccacgggccacccctcgctgcttagttgcccccagaagttagagttgctgccgtgggcgtcgctcctggggccaggcagcgcagaagggtcccattcaagggggaacctgggaccagatgggcaaagactccaggcggagtagggttaacctcggaaggctttctccaaggagttgcactgcggaccttctcgtactttcctccgtcgccaccctgcccactcgtcctgtgctctccggctgccctgacactcagttcctggagcatgctgggcctgcccgcctcccgacccctgaacattctgtacccggaagactaaatcttcgcctgatgctggctttctggctttagcctaaacattgcatttcccagtccatcactctgcttgcacaaaatcccacagaggctccgtggcacccagcacttctcttttgcactcacaactacttactgttctggacagtctttcttactgtaaagttcacagggcaggggctatgactttttgattcacttcagttttcagagccagacataaaagggctcacagtagagactcaaataagtgttggctgtgagttcatcagtgggggattaagagccctggcagctttcaccttgtctggccaaccaaggaagatccctcctgggcctaattcctgggcaggaggagaacttgggactagggtgggtggggagggtgttaggtaagggggagtattacagattgtggagtaaggatcagtatggataataaacacatacagttgtagaatggattagctgaagattcccagctgaattacctggtcagtgagccagacttcgggagctgcctgttttgcccaagatgacagtagaaatatttggtcttctagggaactccactttgggtctcattagtctcgtggtggagtgcagggttggctcatgtctgccagtgtttctggacactacatgagctgtagcagtcaaagtttttcatcctctagtagttgaaccacaagaaacacttttcataaagctagggggagattctagctagccacgaagaacaatttgtatcttggatttgtatcttatcttagagattctatctagccatgaagaactatttgtatcttggatttgtatcttatcttcccctgctagaccatgcaacttgagaataggaatccatttcttaccctctgtattaccaataaatgggcccatcttaggtgcgcaataaatgtgggtaccctgggagtcagaaaagactaagttcaggctgctgggcaacactgtgctgctgcccccttataaggggcagggacagtgtcatccaagaatcccatcaccttgatttaaggtgctttctcccacagcagcc

SEQ ID NO: 541 - DNA, 106730 bp, Homo sapiens
  source 1..106730: mol_type = genomic DNA
gaaactctcctctgctcggaggcttctctgcttcctccacctgccccttcgcctcactgcctcctttcaaaatctgcggcatgtattttagggatactcgtatccattttcaggaattccatgatctacacacagatgacaccaaaatcggaacagcaatgtccacccttctcccgagccctaggtcggtgcctctgtccacctgtgtctcctgaaacttcaacacagacttcaaatggagtggcagaaaaccagattccttagggaaaggaaggtctcccagacggcaggagcggcaggccttaggggcagccgcaggggctcgggagtctgaacatacccggtttgaattcagactctggcacgccccatgcgatcataacatagtgctgcacgtctcaagccacctataaaaacggggacaataacaatatctgcctcggggttaatggtgaggactgactgtgtgtgtctcgctcaggaccaggagcaacaaatgttggcttcttccccggcaaagacccgcgctttctcctgggctccgggttcccggggtgggggtgggcgcagtcccgagggccccaggcagtggcgcagtggttagaccccagcctctggagtcggcctcggttcagattctggttctacccttctcctctgtggcgaaccaaccctccgagctctagtttactcgtgtgaaatggactagccaaaattgggatttttttttttttttaggattagatgtgtcggtccatagacgttgctggccacatagttaagtggtgcgttcactcactgggcattgatggagcgcctactacgtgccaggcctgttttacgcgccgggggcccagaggcgcccaggtcagacaaagtgtaaacgattccgaccagagcccttcaatctgcattccgcttcgcaggaaactctcctccttttatgattttcagccggactgccttccctgttgttagtttgtaactttcgctccggcccccgcagcctcgcgcctgccttccctccactgtcctcagccaaggtgtagtaaagcgtctccgaacgcggcgcgaccctcgcccacgcccgctcgcggggggaccgcaccgccccaggggtcctcgctaggggttcccggagaaggggtgggagatgggggtgcgggggggcacaggagcgcgggccagcacccagacctgctcggtaccggggacccagacccgaggatgccgggcggccaaggccccgctaccctggccggctccgggcggaggaagaagaggaggcgcccagactggatacccgcctggacccggagccgcggcaccacccccagcccgccccacgctcgccagcctcagacggccgcgccccgccccgcccctctcccgaagccccgccccggcgcgggaccaccccctccgcggcctcagctccggtcctggccccgccccccgcgcccccgcccccgcccccgcccccgcccccgcccaggcgcgggaccaccctccgcccgccgaggcgggggcccagcgcgcccggcactctcggcggtccgggcccctcgccactaccgccgccgccgccgccgtgagtcccgcggagccgcgcgcgcccccggctgggccgagccgctggccgacgagcggagcctcaggagccggcggggacgccatgcgagccaggtaggcaggcggcggcggggagcgcctcgggcggcagggccctgggggccggcgggggcgcggggtcgtgctcgggggctttgcactcccttgcgggcgcagatcgtgccgcgggcgccgatcgtgccaccgccgcctgagttcggggctgcgcgggtgcctgggcgtggggcggcttcggggaagcctcgcgcgcccctcgccgctcccccgggcgctcgggtctccctggtgctggtgggcagggacccggcccggggttccgggcgccgagccgcagccctccgcgtgcgctcgggccgccccccaaccccggctctggccacttcccggcgggcggccctgcggggtggcctccctgggcaaccggacgcgtcctcgggcgcaaatcggggggcgcgctcggctcacgggggccgtgggggccacgggagggcgtggaggggtcggggcgcccccctcgagcggcgctggggaggagggaaggacgcgcggtctccggttaaacttgttggtgacaatgcatatttcaacttcttcggagatccctcctgtgaggatgaaattgaaaactccggtttctggcttggcgatcgggtgaccgagcagccgcgaggtgacagcgccggcggcccgcgggcggggaccggctgggatagaggcgcgttgttctctgagcgatgtttaccgagaagcccgctccgcggcacgggcgggtgtcagttgggaccccaaccctgggtcccgcggctcctagcccggggcctgcggtgtagacgggggttggggacaggcccagctggccctgaccgggtgtcgggcgcccagagatgccgcgcgggaggagccgcgggagagccgccggactcagcgagcagagggtcgtggagcctgatggatcgatgagatctgaaaaagaacactgtgcgagattgtattcctgcttattctttccaagttagtaggcagattggaactatagaatttatccgtgataataataaagttcgcataacttttgttctgattacagaaacaatgtatgctcaggacagaaagctagagataaagagaaatataaacagcaaacaggaaaccatccccaatcccacattttttaccagccttgtcacagcctggcagatttgaacattaagttagaactggagccattcttgcctaaaccagagaatccctgaatgcagccgccccttctcacccttgtgaccgtctctgagctccaaagtttgggttttttccttgctccctacccgggcagaatctctgctggccacgagtccccttcccagtgggctgggggctttccttgagatccgtggcccagatgaaatgatgggagaggcctggatcctcaccgccctctgtggttttggttccttgccttgtaaaaatgaaggtaatgattctcaatctgcttctcaagccaccataaaaattaatgggtggtttgcagagcgttttgacatccgtggatggacagcggctgtactttaaggcgctggggaacattctactgttcctcattgcagtggtcatgcagtgtaataggctgcctctcacctggccgtcctgcccaggaaacagactccaggaatgtccagtggagccctgaggacaatattcctggttccttgctcagtgccctcgggactcggccaaatccctcagagtgggaagcttgggaagaggcagcgctctccaatccccctcctccacctctgctttctgcttgtaggcggatttcttaaagtaagggggcagtgatatttaggcgggaccccagattgcccactgcctgatgtttgtgggtctgtggaatgcccgggccgtgcttatccaaaagaacagttagttctgggaggacgcataaactgaacaaacctggcttcctagagatttgtatggctcacttgtttactaaatgaacaatgaccggctgcggagaagcccaggacacttctgtgagctttattattatttttttcctgttgtcccaagactacattttagtgatcttataaaacaataaataagaacccatgccatttgttaattctgggtaccaaaggcccaggtggggagaggtacttcacagcatgccttttgtccccaagcacccatgccacccccacaacaacaaagtaatcagggtagaagatcctctttctgtaaccgtctgtcgtttgatagtttcattttttaaattgtcctttccaccagcacgtggatctgatcagggtctgtctagttgcagatcacagctcaagagggggttttggaaagacccagaaagtgggctgaaaaaaatgctgataaagtatccttcaccgggtgccttgtctgttcatgtattgtgctcttacttttctctgtggagggaggaccttcctggcttttctcccttgctcttgtttgctaatccggcagcctggaattatttccctctgggctgcttgaatagactttcttcttattctaatgctggattctagtctgatcataagatatgcgaatggtgaatgtggtttacgcccttgaatcctgggaggtgttcctggttttaaatcctgggatcctggccagttaagagcccctggctcccctgaaattgcgtgggaggtgtgtgtgctttcttttcctggggagcttcttacagagcccttgacccaaacaaggttgagagctccagagtgcggccctggcagacctcgtccctggaccctggctccaggcagacctcccagttccagcctcgtttcaggtaccagccttgttttgaccgagtaggagctgctgtttacaactggccagccatgtggatttcccttagctttattattttcaaattgcacacctaaattgggctgtgttgtgatttttcttctgcaaattggactcaggcccctgggacatttcccaaggccctggaggtgggcatcaggtcttctctgttgcgaggtagccgcctgacaaccaggaatccgaaaaggtcaccgatcactaaatagagttctcagagcactctcagtgcgcgggtcagctttgctcctggccaggagcgagcctcaggccaagcaacgtttacactcagcttctggggagctgggctaggtctctgggctccccagctatttgcacgaaagaagcctcacattctgccaccaccctgtggagcagtgacagaaaaacaattcatctagcccccaaatacccagggaacaatccagctacttgattcagtatcctccaggaagccgaaaccagctcctcggtgggccctgagggcgtccacgtgttacataacccagcacctgatcccaccgtgacctcgctaaagggaaaaagtctcaataatcagtcttcagagggcgagggagtgcagaatatgctttagaaagaggctgtgtgccgtgttttaagaagggtaaaatcccatgtagaacatcacagcctcccatcttccaggtgaacagtgcctcctgaagtcatcaggaagcatatggatttgaggaagtagaattgctgtatggaattcctctaatttaaggtttggggtattttgagggatggaaataggtaccactcgttgagggcttaccatatgctaggctgcatgtgtgcccttttgaatcctcacgaaaactaccaggggtttcattttacagggaagctacgagaatttaagaaactcctccaaccttagactttaatgagtgcttgagttgggatttgaacctggatctgtccaagtccagagctcgtcatcacatctcccggggtgctgaaattaaagaaacaaacggctctcagtcacacattggagcctgaagatacaggcatgcaaatagcggagtgccagcctccctcacacaattagaaaatagcttgtactctgaaggtgatgaaatctttaaaacatgtgacgctttctcagcctaaatggaaggcagccattttgcacctttgttcgtgaaaccctcaccccgtcaccagggcgaagcaaggtttatttggaagattgtgactttgaagttgggataacccaggatttggtacgatgtctttccttgtcccgtgaaaagagggtgtttgggcacatggggtcactagaatgagattaagattataggaaggcggttaagtaaatgtacaataagggttccaccttcctctttacaatcaaataaatgacatactaatgagattattcttatctgcgcaataaaagcttatctcaggggagctctctttgctgaagcctgttagcccaactcttctgtagagattgagaagaatacttcctttgaaaggattttatggttccaagtttttattaaatctgcataactgaggacaaccctgcctcttttttttttttttttgagttgagatttctctgttgcccaggctggagtgcagtggctcaatcatagctcactgcagccttcaactcctgggctcaagcaatccttcttcctcagcctcctgagtagctggaactacaggtgcacaccagcacgcccgggtagtttttttttttaaattcttgtagaaatggggtttcgctatgttgtccaggctggtcttgaactcctggtttcaagtgatcctccagccttggtctcccaaagcactgggcttacaggtgtgaggtatgttgccctgcccttgccccatttttatgagcaggcaggaagcttttctagcccctccaatgtaggaggtccctgagctcatagtgtgccggtaaacctgctctctgaggagaaagcagagcttcgattgcagtatctgccaatttctgtgacgtaaatattcccaccatggctaatttctttttcttttttttgagtctcactctgtcacccaggctggctggagtgcagtggtgcaatctcggctcactgcaacctccacctcccagattcaagctgttctcctacctcagcctcctgagtagctgggacaacaggcatgtgccaccacgcccagaagtttttgtatttttagtagagaccggcttccccatgttggctaggctggtcttgaactcctgacctcaggtgaacggcccagcttggcctcccaaagtgctgggattacagatgcaagccaccatgcccagcctgatttcaaactgccagtttgggctgggaacattactaaatagttaacaatctgtgtgagccaagaagagctgggtcctgctcaccattcattgcactgagcccacccacacgacacccctgcttccccttccgtcacccccatcactttaatggaagaaattgtggcctcacttctgcttggtccatgtctgcctaggagcagtactgaaaaaggatttgggtactactgagtaaccgaatttggccagcaagagtagaaggcttcaaaactcaggctgcattttaaaatcacccgggagcttaaaaaaacaacaatccatgttccaggcccatccccagttgaatcagaatgtctgggtgtgggtccagacctctgtagatttggaaagcttcccgggtgactgtaatgtatatccacgttgaacaccagggatgtggtgatgaatttgttcaagaagaaagctgagggggtgcagtttggggcagggcgtggcagaccctgtgtatttgagcccaaggaggtgagatctcccttgcagagcagggaatgtttttccttaaggcctcgtagagggtgaggaagtgctgggctaggagaggcaggcggagcccatcttccccccaacaggtctgtcctcctccaggggcacgtgtcctacactgatgaggtccacatacttgtttggctttggttgcttctgctggtctagaaaggaaaagagtcttccttccaggaagtcagggggtcaggatgaagccaggcagaccccctgggtgggtgtgatgagctgttctcagatattaaagcagaggggcttactgggaccacccagatgaaggaaagagaaaccctaccgcccaaggaccatagctgaacactttgtaagagtccttgagcttgggtgcgcacataagctgattattttttctccatcataattaccagtaaaattattttaaaatgtgagagctttccttggaggcagtaagcatgtgggagggaaaagtcattcaacttcagagccagccatggtgagcggggctgggactggggagaggcacacgaggcccctggggtgcaggattcaaggaggtgctcgccctgggggggtgtctggggaagggtctgtcctgctggccagaggagggctgtttgagagagggcggtcctgggctcacttccttagagttgggcagtgagtgtggaagagctcatacatgggaacctagagtgaagagcaggggccaggatcacactgctggatcacccccagaaggggcaggaaggctaagggggagccagtggaggagcagctgggatgggagaacaagtgccctgcggggccctgaagtcaaggaggagaaagatgggggtagggggagagggggttgagagctcaaagcagacgggacagttctgagtctatcatgtgcggaggatttatgaacgggaggactggaaccctgtcactgtggtagtggagaaactcctataatagaagaaatagcacagagtggaggccacgcagaagaatgttggtgataaaagaaattggaccgtatttgatggtgtggagacagggcaggagggagccagggttgggtcagagggactgggattctagcaggggcggaaaattctccttggggtacccgtgcggtggggagtggccgcagatgctgagagggaagcattgggtgtgaatagctgatcaccaggagcagctggttaaaagaccttccccaaatgctttctcagatcataacatctgcaactttttcccactagcctttgtggagggctggctggggggcccatttgtccttaagactcaattcagcagactcacttgctcttccaggcccagttcacactgccttctcagacacacccgaggaacctgcacctgggtctgcctgtgtcctagctttcttacctgtctgttgtccccctaggcagggcgctgcttgggggcagttgcattttattatctctgcatcctccatacacaggagcccctcagacaccatgcccagtgcatgaaagagctggcagagagagagagagagcctggacaaggtgaaaacttagggtggtgacttcatacagccatgtagtgacaactccaatattctcttcttgacatcttggcagtaaaacttacaatatatgatagaagtaattcctccctatgaataataaacggcttacttataaatactgtccagtggccatccccgtagttctgtgcaatttaatttttaattcaggtaggtttaccttgcctttgtttacccattttccactgttgccctttgtaagaggatttgacttttttttttttttttttgagacggaatctcactcttgcccacgctggagtgcaatggcacgatctcggctgattgcaacctccgcctcctgggttcaagtgattctcctgcctcagccccccaagtagctgggattacaggcgcatgccaccatgcctggctaatttttgtgttttcagtagaggtggggttttaccatgttggccaggctggtcttgaactcctgacctcagtttatctgcccacctcggcctcccaaagtgctgggattacaggcatgagccaccttgcccggcgaggatttgattttttaaaagctttaagattaagagataaatggagtattattaaaatgcatgtacatttaagcatttttaaatcctgctaacaatcatagttgatgtacaagtgccgtcaaatatttgtatgtgtcctgtgcataaatgggaaataagggtacggtattcagatctaactgaaaataatgattggagctgatgtaatacttacacataattcatgtagaatgctaggcccagggcctatgccccattgcaaagtggtgaatacagatatggttgtggttcttcctgctgtggtctggtctcacgtttccttacccctgtcccaaatatcccctctagcaagttgggtttttgtttttatcttgtggtttgaggaatcgatatttcaaatgtttgtaagaggaatgctctgttccggttcagtacagagcagcagccattggttctctcctttacagtgtgggactaggacatcaacacaattttgaattttggtctcatttcaggcctgtgtgagggggtgctgactctgggtgacatcaggagatcaggcactggctagtcatcacaaacagaatcccaagagttcacttagtgcccatttttgcttatatgtgtatcttattggagccacctgtgattttcagaactgctgaattgggggaaagcagacgcaactgtttggggccacgtgcgcacacacttgaaatgctcagttgcactgtgtaatgtaggatttttccgtggttttggattcttcccatttttgttggccttttccctgtgttacgcactgagacacttctgtacacagctgtttcttcgaaatcaatcaaatttgaaacagcctgatttgcaaaactgaaagttgttgtatggaggaagatccttggtaagaattacatggctcacgtatcatgttcttcttacattgttttttgtttcccagccattgtcagggaacaatagctggaatgacgttttcacagactgcaatatgagaagttcctttttccagtggcagctccatggctctttgttgggacctggttcattgcggggacatcacagtgggaaagagcagggggtgtctgagccccacacacctgtctgtgtccgaatatttggcttctcttcctgttatgacctcggtcacatttttggacatctttgaggctcagccttctgatctctaaaatgatgaccatcgtacttcgctcctggagttgggcagtttaaatgagatcacactcaatgccactgtactgctagctgtggatttggctccatcattgtccctgtggtttttgtttgtttgttgtttgtttttgagatggagttttgctctgtcgcccaggctggagtgcagtggtgcgatcttggctcactgaaatctccacccactgagttgaagtgattctcctgcttcagcctcccaagtagctgggattacaagtgtgcgccaccatgcccagctaatttttgtatttttagtagagacggggttttaccatgttggccaggctggtctcgaactcccgacctcaggtgatccacctgcctcagcctccccgggtgctgggattacaggtgtgagccactgcgcccggcctccatgttggttttgagccccatgcttgtcagcgtgcagttcatcatgccttgcttcttttgtcttgtgtacatgtaccatagtttattcttagatactgagttaatagaatttctgtgatgttccagcatctgagttgaacagagtgtaagggtttgatattcttctgatgctcaacttgacctttaaaaagctcgtaggtgtggaccaggggctcgatgcagtcctaagtgtctaaataaggtttagggctcatccatgccaactttgcccagttcctgaagttcctggaggaggtggggtggtgggggtgggggtgggggtgaggagggggatgtgtttgatgaggctacaggtccccagacctggggtggagtgtggctctggcaggtagcatagaaggaccagcagcaagtgccggaggcccctgtgcctttgtttgcaagaggtctttacctgccctgacttcttgggtggggtggggaggtgataacatcttttgttcactgtaagtactttgtagacatatgagttgttttcagaattgttccttgtgattttctttcagcttttggtttttttggagacagtgtctccctctctcacccagactggagtgcggtggcccaatgtcagctcaccacaacctccgcctcccaggttcaagtgattcttgtgcctcagcctccctagtagctgggattagaggtgcatgccaccacgctcgggtaatttttgtatttgtagtagagatgggggtttcactgtgttggccaggctggtcttgaactcctgacctcaagtgatctgcccgccttggcctcccaaagtgctgggattacaggtgtgagctactgtgcctggcctcttcttttccaaaaaaaataataataaaaaaaccttttctgcttatgtattttaaattactgaataaattacatgtttgtacatgtttgttttagaaacactagaaaatgtaaaaagaaaaaaaatcacatcagtggaattctaccacccatgatgaccactctggacactttcatatgcgtctttcagatattttcgcttgaagtatagagcttccaaacaaaaacaggctgagacagtgagtggtcttgcctttgtacctggcacatagcaatttttcaataagtatttattgaatgaatactatgctttttttttttgagactttttaggctggagtgcagtgatgtaatctcagttgactgcaacctccgcctcctaggttcaagcgattctcccgcctcagcctccctagtagctgggattacaggcacttgcctgtaattttaatattttagtagagacacagtttctactaattttaatattttagtagagacacagtttcaccaggctggccaggctgttctcaaactcctgatcccaagcgatccaactgcctcagcctcccaaagtgctgggattacaggcgtgagccaccacgcccggcaatgctatgcttttaaaaatagctttttatctaaaattgttgacatattttcagatcaataaatacagatttgcatcctcatttttcatgtcaggtttgtataggtacaggtacagtaccctgtttgtttaataagtgtttgtgaatagacacttcccagttattttgaaattataaacaacactgcaatgaacatctttgatatatagatttttccatgcatgttaagtttctcatttgaatgaatcttttacttttattgtgcttaaaatctatgaagaacttataattatattaattgttgggtgactgtataattactatacagaaaagcacctcaaaagggagtgacgttgggaagagttccagaatctgttgtataaaacttggtgaactttaagagcggccgtacttgttcccatcctttttgggggaatgctttctgtttctccagatcctgacgtgctttgcgttctgcgcttttggagtgggagggtgggtcaacagagtaatgttgatgccttaaacgcatacttcagttttaggatgcacacatacatgccagcttcagaagcattaacatctgggagtaactgtatgttctagagtccaggaggtgtttccgttgggaggtcttcagggcccactccctcctagaaggggatgagtgatggttttcatgcattcagcttcggagctgttgttgtaagcttctccagggtcatgtcgtcatgggtgtccagagtgattttgtggctgtgtcacttgatcagctgtgacaagatggactgcagttggatctggcatctggtaaaagcacagacttggttttcaggacctctgggttcactaaggggagagtttgtcatggctcctgctgatcgcaagactgtaatttggatcttgactgcggtctggtgtcgcaagccttctttctggcaagagaggaaaactaatttatgggcggaatattttttggcctgtctcctgtagttttgcacaggggcctggctgcctcctcaggtcttggcaccgcagtatttgtgagtcatccacctataggtaacatgaggcagcactttggggcttcgtgaaaccccagctatggggataagggactggccagcattcccagcacgccccaggggctgcttagaagcaggaaactgtccatgagttctggttttttgttctgagtgtggaggacaccttcaggaggctggggaggggccctgacatcaagcctgagagctgaccccttttctaactctctgggacatggtcctggctctttccctcttcttgttcacgctttaatgccttttaattccttgactcactgctgagcccctctgcattccgggtgggggagataaatggggagcccaccagatgcagcgtctgcccacagggagttcactgcccagcaggggagaaggggcattcaagtgcaccaggggaaaggtcagggttcatgaggttgtagttgtactgggggtcaggacaggatccctaaagaagccccactaagtagggggacctgaagaatgagcaggccaggaagtgcatggtgatttaggggggcagtggactggtgggttctgggcagggtggcttggtgagtccaaggaaccaaaagagggccatagtgagacccccttcccaagagcacctgggagggattccggggcaggtggctggatcggacaggtccttctgcacttccctcgctttgaacttgtatctaagggcaccaagaagacgcgattagacgtgtaagcgtgacttgaaaggggccgggtgacctgcctggggttccctggcacagggggtgacccatccatcatcgacgcctggcagggaggctaccctgtgcaccacatcctgttccagacccccatcttcacagccctggcactacgtgtagcagagtcggtctcccagcccagtgctcccgtgacccacatgtggtacttctccctcccggcctgctgtgagattcttataaaattgtctctgattaatcaccctgtacagcttttaaaagttacttttattacccaaaacaacacttcagaaactaagctgacggttgaatcattgaaggagtcacagcattctttcatcccagagagaaaaaaggtaatgaagaagaggagactgtccagtgaaaaccacatgagaggcacccagcatcaatgcacctctctctggtcagctgagtccttgaactcctcggcagttccccctcagggaaggtcagcggacaggctgtgtcctggctttaattgtcagtttctgaaactcaccaggctgggtagtcagacttctgacagccactgtctctgcacccccgtgagctgctgagtttactggccatccagagagacttctgtgttgaacccacattaacctggctaatcccatctcttctgtgaaaacttgaatacaaccttttgcaataggaaaaccggctgtcctcaactggctcagaggaaaaccattagcttttcaaggtgaaaaggaaatagtgaaaagctgggagatgatgtcataaacactgatttttttgtcattagtcaaattgtctagaaattggctgcttgctaaattgggagtgggatcgttattctgggaagatgggggtttttttcatgctcaagaagatgggtaaaatggcagtgatttccacagcgaacctgtgttggagggctgcgactaacaggtgagtaacattcgggacaaaattctgatttactgctcagccgatgattgccaactaggcatgatgggaaaaacttgcgcttgtgtgacttcgaatgtcaggttgtttgtggttgtcctcttgtgctactaggatttgcaaataggcaatgcagtagagctcgcaaatggggtctggaagggaatgtacaaaaataacaattgttgtttgggttgagatttggcctggcgaggttgaggatggtcatctcctgctcactacacctgacccctcccgttgtctttaaggaaacaaagtaaacttcgggagaaagaggagaaagaggctgggcacggtggctcacacctgtaatcccaacactttgggaggccgaggcaggtggatcacttgaggtcaagagttccagaccagcctggccaacatggtgaatccccatctttactaaaaatacaaaattaaccaggcctggcctgtaatcccagctacttgggaggctaaggcaggagaatcgcttgagcccaggaggtcgaagttgcagtgagccgagattgcgccattgcactccagcctgggcaaccagagcgaaactcggtttaaaaaaatgataattaaaaaaagaggaggaagggaggtggtggctaaaatttgtagagcagctacaggcagtcactgtactaggttatttcactttcttaatcctcaggaaaactcagtggagtaaatggttttgtttccattttatgatgaaactaaagccaagaggataattaatgtgtccgtgaacatagcaagtatctgaaataccacgcagtaaatcttgtgtgtggcacttaggtctggatattaaccgaggggaattggagacacaaggcaccggcatgttgattttaattttctgcaaactctatttcacattctgcatttgaggatgcctgtgacttggacatcattttgactctctaatattcctttgaattataagggtcttttgaaactttggaaatagttattttcattggcggcaaatggacctggtgtcaaactaatgtgaacgttgcctgtctggcagaaaatgtaaaaaaagctttgcttaattaaggtaacattattcttgatagtagaaatattaaaaatacataatcctacttcgctaactaatcacatttatgtattccctctttctgattcttgtttggtgttcatgcataacacatatattgtgcttatagtaataatagtaatagaatagggctgcatgccatcctgtgttttcagcgctttacaaccttacaaccataggaggggagggactcttactgtctctgtttaacagatcgggaaactgaggaaccatggggtttagggacttgtgtgagctgggaagtgcagaagccaggagttaagtccaggctgtctcaaccatgatactgttctcccctacacggggggccaggtctcaattccagggtgaacaaggtgcttaaccgggaccagactggggagcaggatggggctgtgttgtgggaggtagggaacctgaggtcgcagatgacgtgtgagggtgggcgggaggttgccaggtgggtaatcaggaggatgagttcagacctacagcaggagcactccttggaggatgaggggaaggccctaacaccaagagggtgtggagctgcggtctcaccactacaccctgacacgtgggctctccatcttccctgcctgcttggagtctcctgcagcagtcctcgaccttccagccctgcagcttctgcagcagccttgcacttccctaagtggtattggagctgcgctcattgcaataaggaattattctcatggctccatatccgcgtcaggttacctccttcccgtgcctccctggctccctgggttcttggttcttggtgctcacctctgcacagacaggtgtcactgaagcccctcacccagtgacccagtgatgctgagtcccgctttgggaggtgtggcacaggggcagccacagtggacccttggtggagaggatcagagccaggatccctgccaccctgagtggcggatgctgcagagacaactctttatacctgagaagcttgccctcaggtatctgtactttgtggggcttctctgattggccattgtgtgttcatctaagagttagtgcaggaccggaagctcccacccagatggtgaaggcacctgctgggtttcctgccacctgtggagaagcccgctccttcccttgctcaggtgagggcgaccacacccaggtccacctggttccaccaaccagtccgtagctgatggaatgaagggagcagctgggctgtagccaggtagttagggatctggtcagctcggtggtagcaatgataatagatggagtgttctaggttttcccctttggaaatctgaactctattcagggaatatttgttagtagcaacatcagtagacttatgaggtggggactgggggcttgtgtttccatgaggggttgcagaaacacggccacctgatgcccagtgagtttgtagaaccggatggaccttggggtgttctccgtgtaccttctaaggagtctttaactcaacagagttgttcttttttttttttttttttcaagttgtttactcttattttctagttaccctctagaattattgcattggggccaggtggtgtctagtacagttttttactttggagaatttattgaaattttctttggctgagaatgccttcagtgtttgtggttattccttggatacttgcaaatcgattgtattttctctgggacacggggtttcagatagatcagttaaatgaagcttgattatatcgtatttcacgtcgcatgccatgtgtcttgtctgttggactgtcaggtctcaagagacgggcttgggtttccctgtgtggctgctgccttgccccttccccgatccacactcacggcttttaccatatgttttagtcgttctttcggcataattggatgtttccgttgctttgcaattttaccagtagagaaatcctgtgtgtgtgtatttcatacttttcctgatacccttttattgcctccctttctaggtcatttcattgtggttttattttatgcaaacagtgtgcaagtgattctttctgccagttttcatatttggtgttgtaactcacacagttgatcactgccctcttctttgaagatgctgtcttctagagctctttcttcctttatgatttggaagcgagaccagccaccctggttccaggcgactttgctgttagctttagaaaggagagcattcaagctagtctcagcccagggctacttcccccagggcgcctcttccccgtagccacaggggagctttcatttgagaggttctaattttgtgttgttgaagttgccagtcttgttaggcagactgacagcttaggctatctcacttattggctttttgcagaattttgtgggtggttttggttttgtacgttcggtgctctgatctgcgggtggctttggggaacggtagagtctgggtctatgctccttcctcatggtcaagtcccctcccctgaagtttggaagttgcatgtcatcacgtgcagccctgggacgtcccagtgtgtgctggctctgagtaggtggctctgtgaccctggcctctgactgggaggccacccttgttcctcctgcccattcattcgttgattctctcagcagacacgcacaggctgccttcagcgccagttgtcgccttccagctattccaaggactgaaaacacagatctgatcgtgcctcttcctggcctgcagacttccaagggcttcgtggttgtacagaataagcctccgcttttccacacagcacacggagcctggcaggctggacttggagggttttatcccgagcctgctcctgccctgcctcctctggtgggcccctaggatgcctgtgggtcctctcagggaagcatgtgtgtaccccagcctttcccttactgcctctgcccagtgggaccttccttctcagctttcaggctgagacgcgtgcttgcgcgcacacacacaccccctctttctctgtctctctcacacactctcgctgtctctcacacacacacttacacacactctgtcacacacacacatttgcatacacacacactccctgtctctcacacacacacactctcacacacactcccacatacacacactcgctgtctcacacacacacactgtcacacactcacaaatacacttactcacacacactcatacacacactcacactgtcactcacacacactcacaaatacactcactcacacacactctcacactcttacacacacactctcacactcactcacactccccctttgtttctagagcgcttctgctttagttgtagccgtattggtcagaactcaaaacatttgggaacgctgatgccgaaggactggccggatggaatcttaaatgtagagaagccttaacccctctgtaaaccttggcgggacttctcctttgtgcatcagaatcaactgtgaaggttaaagatactgctcaggtccttcccctagagattccattggcctggaactgggacctctggctttttaattttaaaagcatcctaggtgactcgataggcccaactgggattgaaaatgagcagtttagacagttacctcctttggaatacgtgtcttgagtggtatcatttctgagatcatggttttacaaaacttcgggtgtgcataactctttttattgtaggaataataaaagcctttgtagtcattccaaacattacagacacatagaaagtgaacagtgagtcaccctcctttcctggagcgccttccctcggggcgcccgccttgcattccgccgctaattccagctaattggggtgcactcttcagctgacttctgttgcgtaggtttccatgtctgtattcccagatgggatttatgtgtcgttttcttttttgtttattagcgctggggatcaggatcactttttgcctcgtaaaagcaattggagagagggttgactttttttttttaactgcgttggaattgttctgtaggttatcacgcccagattgaaagaaggtagatgtggggatggctgcagcgtgagttaccggacacaaatttcttcagagactacatgaagacaacaaaataggctactcattatggccttcccccactgcctttaaaaaaattctaaaattgtggtaaaagacataatataaatgttatcatcctaaccatctggagcatacagttcagttgccttagtgttgtacagcagaatcttcacacctttttcatcttgcagaatgaaaattctgtacccgtttcctcctcccccagctcttggcacccaccattccactttctgttgctatgaatttgattactacaggtacctcacgtaggtggaatcatacaatatttgtctttttgtgattggcatatttcacttagcatagtgtcttcaaggttcatccatgctgtggcctatcatgttacagttgaaggctgcataatattccattatatgtatatgttatattttatttatccattcatctgtccatggacatttgagttgtacctcgtggctattgcgaataatgctgctgtgaacctgggtgtgcagatatctctttgagaccctgctctcagctcttttgggtatattcccagaggtggaattgctggattatatggtaattctatttttaattttttgaggcacttccatattgttttccttagcagtcactccatttggcatttccgtcgacagtgtacaagggttccggttccttcacatcctcaccagcgtttgttattttctggttttttgacagtagctgtctcagcaggtgtgtggtggtctcccacagtgtttttgatttgcatctctctgatgactcatgatgttggccagcttcccttctttaaactgcatttattaacttaaattttctgtaaagttttcctttttctttttttcttttctttttttttgagacggagtcttgctctgtcgctaggctggagtgcaatggcgtgattttggctcactgcaacctctgcctcccaggttcaagcgattctcctgcctccgcctccagagtagctgagactacaggcgtgtgccaccatgcccagctaatttttgtatttttagtagagacggggtttcaccatgttggccaggatggtctccatctcttgacctcatgatccacccgtctcagcctcccaaagtgctgggattacaggtgtgagccaccgtgcccggccttttttttttttgttttttgttttttttttgttttgagacagtgtctcaatctgtcgcccaggctggagggcagtggcgccatcttggctcactgcaacctctgcctcctgggttcaagtgattctcatgcctcagcctcctgagtagctgggattataggcacgcaccaccatgcccggctaatttttgtatttttttagtagagacagggctttaccatgtggccaggttggtctcggactcctgacctcaggtaatccacctgcctaggcttcccaaagtgctgggaagcatggtggctcatacctgtaatcccttcagtttttttgtattttttctttttttggtagagatggaggagggaggagggaagctgaggcaggaggatcgcttgagcccatcagtctgagaccagcatgggcaacatagtgaaaccctgtctctacaaaaaaatacaaaaaattagctgggcatggtggcatgtacctgtagtcccagctactgggaagactgaggcaggaggatggctgagcccaggaggtcaagcctgcagtgagctgtgatcatgctgctgcactccagcctgggtacagagcaagaccttgttaaaaaaaaataaataaagctcaagtgaattgttttagatagtgtgtgttttctttcattgcacgtttgcttggggagcttatttctgaacagactgcagagagaagttccttccgtaaaaagtgggaacaagcctttttcccggcttcactcttccaaagccacctttacctttgcagattgttgagagtgaatgtagttgaagtaggttgtgttgaaaaacacgtgcagaacacagacatcaccgcagacctgagggctgagactcaagcctcctggtgactctaaagtatggccagccattgtccttttgtctgttggtgagttacatgtgtatcatagaagatgtagaaaatagagcctcggaaagaaattaaaaatcacccgacttcccttaactccattactgtgagctaaatcacagagacattctttttagatggggtcatttgtgttcatatctgcaccctgcttctttcactgggtggtttcactggcagtgctgacgtcgcccacacaccatccacctgtgagccatccctggtgggaggtggaaggccatcttccggggaaattattttcagtgctgtttcgtgacccctcgctgatggaacacagtggttcacctacccctgtgccctcccggttttaacatttcccttccaatcttccttgctaagattggcatctttgcagcatttctaagcagtatgtacagcctcactttgcagaagtcattccagtgctctgtcctgaaatcaagtcatcgaggatttgttgaccacctcttatgcaggaggcaccagtcccaaagcaatttgactttctgaggcagtcgtatgcaatacgtacccccctgaacagacagtacctgccctttctcacttaattcagctgtaggctcccagaagcccttctgtgtaaagcctggatttttttttttttttaggcaccgtcttgctctgttgcccaggctggagtggagggcacaaggatgagtgacttctgggctcaagggatcctcctgcctcagcctcctgagtagctgggcccacaggcgtgtgctaccacacccagctaagttttacaactgtttttgtagagagtttccctatgttgcccaggctagtctcaaactcctggggtcaagggatcctcctgcctcagcttcccaaagtgctgggactatagatgtgagccactgcacctggccaagcctggatttttggggggctgtgaggctgcactgccaacatgagccagtctccaagtgctccgggtctagtaagtcaacaggggaggctttcagaactcagcagctcctcactggctctgggaaaactcatttagcgatttgtgaaggacctggcgcagtggctcacccctgtaatcccagcactttgggaggccgaggcaggtggatcacctgaggtcaggagttcgagaccagcctggccaacgtggtgaagccccatctctaataaaaatacaaaattagccgggcatggtggcgcacacctgtaatcccaactactcaggaggctgaagcaggagaatcacttgaacccgggaggctggggttgcagtgagccaagatcgcactattgcactccagcctgggcaaagagcgaaactctgtctaaaaaaaaataaataaataaaagagaaagagagatttgtgaaggtcatgagttccagcccatttcactgctccataaaatgctacgttggtgaaatgggcaggatgagttgctctgtggacaggcagccctggagctaacaggagtatcctgcatcccaccacaggatgtgctgagtccacttggaagcccagaaaaagcttctgtgtttagcccttcagtttcttgccttagtgttaggctggcgcgggccttctggtgctcagggcccccgttccctggtctcattttacactaacaagggcttcatgcagcccgcggcccagggcgttcacaagctctcttagttccgaaaaatcgaggggttccttgccagcttctctggctcctgtctgcctcctctttgttccctggctggtgttggggtgctttctggacaagggtgaggggaggggaaggaatctgagccagtcagtgtgcccacactgggggtgctgcaggtcgcgtttcaccctggcacgccctgcctgccccgttacgtggcgatttgtgatggggatcataataaaacttagcctgattagaggcatgtgggaagcatgcccagcacacgtctcagtcccgtccctcggagcaggccaagctcgggcggcaggcagctgccttgcaattctcggagtttcaggaactggacaggggaaggttggcttgcgatgtatttctctgggttcgtttggtgccgggattgagtatttctggtgagacagttgttggagagctcctggggagacaggcattttgtggttggttgcattgttatcccacagggaattggtttcttgcctccaggaaatggcagtaacatcggggacagcagcagttgcaggacgacagacgtgtcactgagggtgcagggtgctatggctggagctgctgctgttctccctatcactcgtggggaagccaggcctggcgaggtgcaggcacttgctgaggtcacggcggccagactggagcccagaactctgtctgcacctaagcacagtgtcccttacctccagcatctgagtcccatcgtctaatgtggctttaacctcaggatcgggcctaattctagaatcctacctgcaagacaagcactgtaagtggcttcatttcatatatggggaaactgaggcaccgagcagttcgctcaagctttgagggtcaaaaattgaatgaaagttgtttgaggctgggcgccgtggttcatgtctgtaatcccaacacttcaggagactgaaacaggaggattccttgagtccaggagttcaaatccagcctgagcaacatggtgaaaccccatctctgcaaaaaacatgaaaattagctgggcatggtggtgcatgcctgtagactcagctacccgggaggctgaggtgtgaagatcacctgagcccaggagattgaggctgcagtgagctgcagtcatgccattgtactccagcctgggcaacagagcaagaccctctctcaaaaaaaataaaaaataaataaaagtagtttgaccaggaacattcaaccttagcttctctctaacctctagtggcttccccacttctctgcctaaaagaagctatttcttttctccagcctcagtttcctgtctcgtcagccccatagaaactgagctctccaaattgaacgaggaccccagaacacgggagtctgtgccgagtttggcaccagggatgatgtgtgtggttgtatcttctagggacaggggccctggctttcatctagtgacccctgtggaggactcctgcggattccccatctacccatgaagagcggctcctgcggggtggcccgggttaccccagcagcagcccacctggccaggtttgaagggcttgggcaggacaggtggtatctgggcccttctcctaaaaattgcctttttataaatgcaggccaggctgtcacctttatttatttattcattcagtcacttagattttaaacttgtgttgaccttatagtcaactgatagttctgagtagttaagttagatccttagggggtgacagggccggtgtgtaccaggttaaggtctctcttgcattttgtgggtggctgcctgcagttaagcagggctaccgtctctcggcccggggcttcttgtttcatgataaatacagaagccgatgtttacccgcctctggtagcggacataggggcatctctgagcagagcaagcaggggcctgcggaaggggttaagaggggctgggcaggtgaccaaggtcaccatggcagggataagtcacgctgatggcattgtgtggcaagaaggacacctgcctctggtcttcctctcagtaacacacaacccagtctaactgggagaaaaacccccagccgaggggcgtcttacagaatacctaaccaggcctcctctactgtcaaggtcacccaaaacacacaatgtctggggagatgccctagccaagaggagcttaaagagacacgacacctaatgtcatgtggtgatctggatgggatcctggaacagaaaaaaaggacctcagggacaaacataggagacccggatgaaggacaggctttattgtttgatgatagtgcaccgacatccattgtgacaaaggtgccgtcctcctgtaagacactcacagggaagccgggtggcgggaggcctgtgggaattctctgtattatctccacgacttttctatgaatttaaatctatcctaaaagaaaaagcttatttaagaaaataggtaagagtggttaggaaggctggttggaggctggggttccaggcctgaccctctgcacccgtgtctgcttcaggcaggtgacactgggcacctcctgccggggagaagctcagggtccccatttcctggccgggaacttccctttcctacagaccctcgcttggtgcgccatggcagctgggcccaggcctcccagttgggccgaggcccatctcttttcccaacagcacatcctttgttctctccagcccagacgtgtagaggtgagccaccctcctggccagtgaggagcttctaaacacggaggcagatcagctttttgccgagtgaacttgagaaccggagcagagctgcagggacaatggtgcattattaaactgctctgaaactcagagcccagagcacccagctctggggcgactggcaggtgttggacctgtggccgtggtgccagcccccactaatcccattagcgacttaggggtgagtggatggaaaacaggatgagagtgtctctcccccaaagagggctggttcaagtatgaatattcacagccacaccgaggcacctgctccgtagatgatttttttttgcttatgcagttagtgcacagagtgagccctgcgctgggaaagacacgcacacgcatatgcacacacatgggcacacacacacatgcgtgcacacacacgcagaccctgagaccctgcacttgagtttctagtcttaagcaagaagggtgtcaccgaggttgtgtcctgcagctgctagtggccagtctgtcccacttggatggtctgtttctattttattttattttttactttttttgagacagagtttggctcttgttggccaggctggagtgcagtggcgccatctctgctcactgcaacctctgcctcctgggtttaagcaattctcctgcctcagcctcccgagtagctgggattacaggcatgcgccaccatgccggctaatttttgtattttttagtagagaaggggtttcaccatgttggccaggctggaatcgaactcccgacctcaggtgatccgcctgcctcagcctcccaaagtgctgggattacaggcgtgagccaccatgctggcagtctgtttctattttggcatttcctcactgcacctggagaagagcttcattcattaattcatccattcattcattcattcaacaagtacctgacagcctgtacagcagtggtgccaggtgaggagggtgggtaaaaatgcagggtcctcctcactgcagtcactgcgggaccaggtactcttttcctgcgccccacactgccccaaggccccactggtcatccgtccagcactctgtgctcgctgactggtgcggtgaactctccggctgggctcctttcctgctgcaggtgccgcgtctctttcttaagcctgtgtagaaagttcttttgtccgggtgacattggcatgattgaatcagtgccagagccaaacaggatgtggttctgggcgactcccaacttccagcaaatccgtggttgttttcagttaccttaagagggacaactgaaacagagacaagcaccccaacagtagggtgcttcgaggtcctggaggggagccctggccctgtggagagagaccgagtcgtgcagcgtccgtggcctgcatttgaaactgaagggcaagaggctggtgagatccgagagtcatgccgctgcgtggaggaacatgctgaacctctggaggaacggctctacctccaggtcaggctggaggcttttgcatttggtttggcgaggagagacagcaggatttctgggtgccggacatgcttctcggtcagagctggtgcgtttctttgcagggcaaggtggaggcggggatgccagggaggcatctgctgcatttcttgaggtttcacagggtgcagagcccctgtcctcactgttctgtggggtgctaagggagcaagccatgtggtccctgaactttgagtagatacaggtaatatttgaaaatatttgggaatgtttacacaatcacaaaaacaatgaacacttgtgtagccactactcaggccaagaaatggaacttaactttgaaattccctttgcccctcccaatcccagcttccagctcccgatcctctccccttcctgcaaaaatgtgtttatcagataaacctgaagcatttgagggagtccctgtcctgaatttcgcagttgtcattctctgctgttttttagttttatcacatggggttgtgtttctaagcaacatcgtttgtttttgtttttaacttttatgtacatggaatcatgcagtatcttttgtggctggcagactctgagatggccttcagtgatccacacctcctggtgttcacatcctgtgaagtcccctccctttggcgtgagccgagctagcaacttgcttctaaccagtaggatgcatccaagttgatgctgtgccttcctcccgtgattacattatgtgggcttagaacttcttccttgacaacagatggtctcccctgctggctgtggtggagcaggctgccatatagagaggccatgtggcaaggaactgagggtggcctcccccggcagccagcatgcagttgaagcctcagtcccatggccacaagtaactggatgctacaacaagcagatgaccctggaggacccctcccccagatgaccctggaggacccctccccagtctagccttgagatgacaccccagcctgggccaagactttgatggcagctctgtgagaggccctgaagaagagagtctcttctttaccagttaagccacatctggattcctaacctacagaaactgtgtgataatagaagtctgttgtttggggcgatttgttacacagcattaggtagctaatacatagtcttgcaagagttcgttttttggctgagcattatgttcttgaggttcatctgtgttgatacctgtagttgtagttcatctgttttcattactatgtgcctttcccctgtaagtagtcccccccttatctgcaggggatacagggcccccagaaggtgcctgaaacttcagatagtaccaaaccctgtatgtactatttattttttcctatgtatacatgcctatgagaaagtttagtttgtaaattaggcacactgagagatgaacaataatgaataataaaatagaacaattatagcactatattgtaataaaagttgtgtgaatgtgttttctccctgccagaatatcttattgtactgtagcacctgttttgggaccacagttggccaggggtaactgaaaccatggaaacttggggtgaggggggactgctgtatgttaatgccttagcttaattattctttctgctcctaaaggacaataggttgtttacagcctttgctatcaaaaaccacacttgctgtgaaggtctttgtacatgacttccagctcagcgtgcaaatgtttatctagggagtgcggctgggccttggctgccagtccagctccacttcccacagcagccttcaggttcgcccaggctcctccgcatgctcccctccctcaatattgtccgcctttttttcacttggggggatggtctgatgggtgtgagatggtatctgagtgtttttatgttctgccagaagctaatgttcactgaccattctgatttcctcccatgcggaaatcctttttgtggtttttgcccgtttttcttactgaattgtaggagtgcttttcgtttttgtttttttgagacagggtctcactgtgtcgcccaggctggagtgcagtggcgcacaagctctgcccactgcaacctccgcctcctgggtagctgggattacagccttgtgccaccatgcctggctaattgtaggagtgctttgaattttctggaaaataagcctctcttagttacgagcattgcagacactgcatcccggtttgtcccttgccctcatgggcttttaaaatcaaatcaggcacaattctgaatttttctgtcccgggaggataatttgcagaattacacttttgcggcattcctagtcctggcctgtgtgtcctggtctttgggtcatggactggtgcctgtggactcggcccctgtttatcgctcttgcttgatgctgccttcctgaggtggagactgctgggctctgttcccgtctgtggctccccctctagtctgggagtgctttcctgttcagatagctcattccaacctcttagtcactttggagagcctcgttcagtgagtcagcacgggacctggagctcggggacccctcacagccaggccagtgcacacttggaatctgcagtttgtcttaggcccctgaaggtgattgcttgaccgcagaggaatgcacgggtctggggagaatttgcccagcgtgtttagaaggaatgcattcctggagaaagttaaaattagaaaaagctgctacatttcctgccattcagtcgcagttggctggtgtttgtttgcacaaggattctttggtaacaatctgcagtcggtttctggcggaatgtgaggtgaagtcacgactgactttcgggatggaggtgagcggtttccacagggatctttgttgtgggagtgactgctttgttttccgagttgttgcagaatcataccggagtggaaaaatattaccgaaacaatcccttgttgatagttagcaagaagattattttatttattctagaaaacagctctttagtgggaagcaaatatcgtggagcgcatctctttgtaagctcggctgccattttcccgtccccgcctccttcctgggtggccacctctgatgtcgcctcctgaggctgggctttttgggaaactccctctgactggcacaggcagtggggtccaggttgagcaaatacaaatgcagaatacccgggtccatttgaatatccggggtaatgtacactaaaacattattagttgtgcacctgaaaattcgatgtaaccggctgttctgggttttgtctagagacctctcccggcccagctacactttgaagcccgctctgtcctggtctctggtggtgcctgggcctctcccagctgagcggggcatcgctggcaccaggtgggctattggcaccagtgggcacacctgtggctttgcagggttttgtccacttctgtgttggtgccctccgcctgctggtgctgggctggggtcgtgtgcccactttatggaggcggaatggagaggccggagggttaccagcctgtccagtagtgtgcagctcgtaaatggaactgttagtctataggtctcaaagcccagcagctggagggcacaggagaaattaaaccatcttcttccctggggagcaaaaaaagatggtcagaaactcacgcacagggaggaagtgctgtggggctgagagtctgggtggcaggtgggctatccccgagacctgggaacacaggctgcggggaagcctcagtgtggggcttgagggagaggcagtttttgcacaggcagggaggggaccaaggaggcattccctagtcacaggggcagtgggcaaatgggaggaggtgggatatgtataggggagtttgagggtggggccgctgacctggctggagtgaccagtggatgccatggagtctgtccacgtggggtagggcaaactgcagagaaccccgaaatggggcagggaagcctggctccaagggaggaagaggcaggaaggagcaggcaccctgtgctcttgagccggggataatacaatgatgatgaggcagtggggctgtaaatttggtggagagatgcagctgagaccagcggggaggtggtggatcggtggacctgagaccaaactgccgattacaggtgcttgggaagcttccttttctgttcaggcagcaggtgctattgatgcagctgctgctgagcactagtgcaggcctaggggctgggtggggatacagaagtgagcaggacaggtgggttcctgcccgcaggccatacaggccaacttgcgaaacacccgggtgccaattacccagggcactccacacagcccgttcaaggtgcttcttgtttttgtccccagatttgtgcttgagaagctctgagttcccgtctgtccacctgcattggcatatgggtactctataaatcatccatccattcaaacattggctgactgcacctgctatgttccaggttgttcctggtgaacaggacaaagtccttgcattcatggagcctgttctggtgggagaaaaaggagagaagtaaatgacagatacaagaatgtcaagagcggtggacgagaccaggggagggagtgggcagcaatggtgtgcttgtgtttttgatacggtgtggtcggctgagtaatcccttccacaaaaaacatatttctatcctaatgctcagaacctgtaggtgttaccttatttggcaaaagggactttgcaggtgtgattcattgaaggctcttgagatggtgagataccctggattacccagatggaccctaaatgttatcacgggtcttttaagagggaaatggagatcttaccacagcaggaggccctggaatggtgggagcagagactggagtcccgagctttgaagatggtggaggggccctgagccaggaatccaggcagccacgggatgcaggaaagggcagggccacagaagcagctcaccccctcggagcctccagaaggcactggccctgtcgtcagcccagtgggcctggtttcagatttccagcctccagaactgttggagagtcaatgtgtgttttaagccactaagtttgtggtagtttgttacaacatcgataggaaagtcacgcagggttctgcggctttgagggagttacgtttgagcagagccatctgaggttggggctgggcttccctgctgacacgtgggctggggccacagagcctgaaccaggatccaggcctagctaagggtcaggaatccctgctctggcagttgtcctcagcctggaagtgacccacagggcatatacacgtgtatgagttttcgtttgtttgtttgtttggtgcggggcagggtctcattctgtctccaggctggagtgcagtggtgcaatcatggctcactgcaacctcgacctctgggctcaagtgatcctcccaccccagcctcctgagtagctgggactgcaggcacacatcaccatgcctggctaatttttttttttttaactttttgtagagacgaagtcttgctgtattgcccgggctggtctcaaactcctgggctcaagcaatccccctgctttggctgtccaaggtgtagaaattacaggcatgagccactaagccctgtccttttcagtgtaaaaatgtcagatgaggaatcaatcccctttgctgagtataagtgtatcttattaacagaagaaaatatttgcttggctttctaaattgggaatttctaacaatccgtaacagcccactggctttgaccagaaccgactgagtgctcaggaccagaaccgaccgagtcctcagttacatcactcagctgagtgcctgtgtcgtggacagaaaacccagtggtctagcaccatttaccatctgtcctggtttacaacccctgaaagcagagcctgagacaaggacttgggtgctgatgttttcggggagatgactggtcccagcagtccatccaaatagaagagggtgagaagagggaagaggaaaagctaatcgggggtcagctactgagctagtggccactgttaaccaactattagggctccatcatgctggagacgcatttgaggagccatgagactatgccctagaattgtctttctggaggccaggaggcgggggcgtcgaccccagggcagccctgggggctatatgtctgcagcgcatcctccatcctgcaggctgacccgggcttggggctgtggtgtgctgggatagcggagcacctgcagatcacaccccctatttggagaatatcttgacagcgcagcaacagagtagtgagtgtacaaagatctactatagctggccttcacttccacgaagtcctcactttgtggctgtcccctgggagtcataagaaaggcacatagtttagctccatccaccaagatttgagtcacctgccaacatctgccttaatgacttcacagacagtcattgtggcggaagctgtttagaagaatatgggagaaagtcaaaagtgtgcgtgaatgaaggggaatgaagtgggaaaacgcatctcacctgcatacacatttttgactcttgtgcacaagcatttttgaccctctgtgcacagctgtttttgacacttgtgcataagcattttagacccaatgcacacagtcgtttttcactctctgtgcacaggtgtttttgaccttctgtgtgcaggcattttgactctccgcgcacaggtatttttgaccctctgcgcacagatatttttgaccctctgcgcacaggtgttttgactgtctgtttgtagcatcctcccttgatgtatgttcgggtgaagcagccctcgatgcacacctatgagctcagggactgtgcgcaggtgaaccagcctgtgacacacgcctacgagctcaaggagcacggtgcaggtgaaccagcctgtgacacacgcctacgagctcaaggagcatgatgcaggtgaaccagccctggatacacgcctatgagctcagggtccatgtgcaggtgaaccagccctcgacacacacctacgagaacagggaccatgtgcaggtgaaccagcccttgatatacatctatgagcgcagagaccacagtgcaggtgaaccagcctctgacactcatctacgagaatagggtccacgtgcaggtgtaccagcccttgatatacacctatgagctcagggtccatgtgcaggtgaaccagcccttgacacaaacctatgagctcagggtccatgtgcaggtgaaccagccctccactcacacctatgagcacagagaccatggtgcaggcgttatctctcttattcatgaggaggcccagtcattccctccctaccctgagttgaggaggaaggataagacttaactgtggtcccagcatttagtggcagagccaggatttgagtccatatttaaataaggtccaagtcttcaacatactgatgtttcccagatattttcagcctcctaaaggtttattagggggacaaaactctttcaagactccgtcacaaacattcgtagtctgattcaggcaggaatgttaacttctactttcaaagacttgtgattttataacctgccatgggaaaaggaaatgcaggattggagcctggtctggaatcttacaccctcacttgtccacgtcctgtcttactgcagcctgtgtggtcttgggattgttctgtttgtgtttgtcgttactctgcatatcatggctggtggctttgggttaggatcccagcttttcacttcctgatctcgggtgagtctttgaaacctggtcagcctcagttctcttatctgctaaatgatggcatgatgatacctgtctggcctacctcatagggttgtgaaaagcgaccgagaggccagatgggaaagtatgttatcaactaggatacattatgctaatgattttattttttttttttttgatgaagtttcactcttgttgtccaggctggagtgcaatggctcaatcttggcttgctgcaacctcagccccccaagtagctgggattacaggcatgtgcctccatgcccggctaattttttgtatttagtagagatgaggtttcaccatgttggtcaggctggtctctaactcctgacctcaagggatccacccgtcttggcctcccaaattgcttggattacaggcatgagccaccccgcccggcctgctaatggttttcagaggcagcatcaacatcagctgggagcatgttagaaatgcacattctcaggcccaccccagacctacagaatcagaaactgagcgttgttgggcccagcaacctgtgttgtaatcagccctccaggtaattccagtgaatgctggcgtttgagaactactgccttagtcacagaatttcacgggtgttgtatgcaatttctactatgtatttggcactcagtgtctggtatatttcaaagaaaaaaaaaaaagacagggtccctgccctcaacatggtctacaggctggaagaaaaattaaagcaagagaaacccacatgaacttgatgtacgttagagccccatgttacagttgaggaaaacgaggcccaggaaagatgagtcatttagcaaaggtcgtggagctggtgtgagaaacgtgaacccacatgtttgacttatgacaatctccagacccttcattccccaggccgcctccccccaacatgggcggctcatggtgtccccccacttattcatgcgagagagttccgaggtcagaatcaaagcctaggacgccttccttgagacactctccttggcttgcttttaggtggtgattttcgaaaccttggattaaaaccttcaccccccacagccacagtagagtccagaatgatgaactagatcttgtgaggctccagaagtgattgggcagtgagttgaaaaagtcaaagtctagaagaatcattaaaaatacaaggaaaagccgagtgtgcatgggtcttccagtctttctgttgggtgcaggtcttttctgagtgtgggtttggccatggtgtctcctgtgtaacccacatgcatgatgacatcattgatttccagtccaagatggcgccatgacacagggacactggtgaagccatccatgcccagagttctcctagagttgactgcattttcctcaggtgtttaatgtcatttagcttgccagccacatttttttttctttgagtcagagtctcactctgtcgcccaggctggagtgcggtggtgtaatcccgcctcactgcatccttcgcctcccgggttcaagcaattctcctgcctcagcctcccaagtagctgggactatgggcgcccaccaccacgcctggctaattttttgtatttttagtagagacagggtttcaccgtgttagccaggatagtcttgatctcctgacctcatgatctgcccaccttggcctcccaaagtgctgggattacaggcgtgagccaccacacccggcccgccagccacgtttttaagtgattcacctttagcgagtctttctgaaacatttcacttgaattgccaagggagctgcccttgtctcacccctggccatcagtttatgtagtaattaaatatgtaaaatttccacaacaaggaccccagctccagccaggggagcagagcccaaaggggaatgagaaagtagtcttccggccacacaggtgtagtgggccctgtgtctcattgtcctcccgtcttcacactcaaaggcagggggcctccgcctcctccaccgccctgccagggagggagggcgttcagagaaggcagccactcggtgctgcgcgggtgccaggaggagctcacggtgtgtaggggggacgcatgaacaggtgaacaaagccgttgcgggtgctgggtgggtggttgtctcaacgcccctcctccatttttatgcttagtattcattctaggtttaacacaggagagaggaaggttatatcccattccgtatcacattctctgtaaaattggaaattttatgtaattacaggaagggtaagtgaagcagttctgtgttctgcataagaaaatgtaacatccatcaggtgagatttcaggccctctcacttggctgcttcatccatctgttgcccaaatacgttgtcagtgtgtaagttttaatagtgttgattttgatagcatgaagtagaaaggcttttgtccatctatcagagtgtcgctttctcagttctgtaaattggttgtctcggagtggaatgatctgccctcatagagaatgaaaaacctggggttgggtccatggccaggccatgaagtctctgtgtagtcttggacgtgccgtgcatgaggactgattgtgcgaacccgaagctgtaggaggatggcgtcactgtgctgccagagcggggccagagatgcctcccctctttttgaggttggagccagctctagaaagaaaccttgaaatggatgttgggcccgttcccgtctccctttctgaccacacctacgtctgcttttctttccttccctcttgccatctcctaccctagctggtctcttggcaaacactcctggcatgcagccatgtacccgggtgaatgcccacttccgtttggcctgagcctacatcccgcctggccctttgcccactgcgtaagtaggaagggtagagaacagggcttggcacacttttctctgtaaaaagccagagagtaactattttccaccttgtgggccataaggtctgtgtcacagctccactgttttggttgcacagaagagctattgataaactggtggggctgggctctgtgcaacttaggtaaggacactgcgacttaaatttcttatcattttcacgtcgtgaaatattactctttttattttccccccaactgtttaaaaatagaaagacgttctttgttcatgggccatacaaagataggtggccaggttggatttggcccgcgggctgtagtttgcctctgggttggacaagaattttcagggtgaacacccctcatccaaaaatttgaaatccaaaatgctgcaaactctgaaactttttcagcaccaacgtgatgccacaagtggaaaatttctcacctaatctcacatgacaggttgcagtcaaaactccagaacaaaattatgtaaaatgttgtataaaatcacctttggactatgtgtataaggtacggatgaaacataaatgaatttagtgtttagactggggtcccatctgcaagatatctcattgtgtatgtgcagatgttccaaaatctgaaatccaaagcacttctcgtcccagggattttggataaatggtactcagcgtgtatttagttctactttgtagtttggttctactgactggctctgatgtatggtggtgggtgaggctggagcgaccccagtcatccagctgtcggggatgcaggctgtagaggctcttctggccgatggctccattgatgtccactgtggaggcttaaaaaatctaagaaataggcttacacgttttccagtttactcaacaccagcctaacattgcttcacctcaacccttcaagaatgtgtcccataactaagtgggttggacttttgggcccatacctgaagttgttggaacaaaattagttttgtgtgttcctgcatattccctgggaactcatgcgggtctggccctgaaagactcagctctgcagcgtggaccagctcttggtgtggtcagcacaggccagcctgtaggttgagttgggtgaagagttcacggagcattttcagatctgtcactccctcagcaacctctgagatgggcagagccgtgagaattactttgacggggctgttgtcaatgaaccacaaactgctgggtggtttgcacagtggaaaaggattgtcttacaggtcaggaggctggaagtccaagatgagtgtcagcagggctggttccttctgaggctgagggagaatcagttccagccctttctcccttagcatctgggggtttgcaggtagctgttggcttgtagaagcctcaccccccatcttagtcatcctgtcacctgtccctctctgtgtgcatgtctgttgaaactccccccttttataaagtcactgggtcatattggactggggcccaccctggtaatctcactttagcttgattgcaccttgaacactctgtctccaaataaggtcactttctgaggtactggtgatgcatacaaatttggggggatgcaattccatctataccattgggaaatggggtgaatagctgtcttggtgactgtcctggaatgaggatttaggacacagtggtcatctctgtgtgtgaatatagcttcctgtttggatgtggtagggtgaggaccatgagcctcatatcatttatccactcaccctcccagaccctctgaggtgggatcaactctctgcagatttgtcatcagctgagactgtcaaccattgttaaaacagctactcagatggacagagtgacataactgcccttctctctgcaccgtgggagaagacacttgtgttttgagctgctgaagacaacagaatcttgtcttcttggcattgtggtttttggagatttgccccaaatcatggttaatgacaacactgatgtttcttgaaacaactggagaataaggcatcctctagactttctgctaattccatccacccacgctaaaccgtgtggttttcttggggcccctgaagactgacgggtccacactggtgtctggtggtgcccacaggagaacagtgcttgactgaaagatcgtacccccctcttctcagcaaggcggtccttgtccagaggccttgggcctctggagaggttgatcaggagttggggaagtggaaaggggccagcggtcttgtccactgaatccatccactgggacctcccggacatgacaagccagattctctcctccctccactccagcactgaggggctagtggtgccacatgtgcacctgtccctgcccagggtccagttctggcgtctctgagccccctgtcagggcagctgggtccccccatacttaggcatgaggtatgagtttacccaatcatccccctgtccagggagcctgccgggctcagcttcaggaccacaaggctgttaagtaaagacgctgcctaaagaacctgccagaaggaaagctccagagggcttgcagggcccttatccaaaaatgtgaaaataatcagtgctgaaagccacagtgacggagggtgttgtcagcgcagcctctctttaaatagagaaaggagcacagcagctttttggagttggggcgaggtggcatctggagtttccagcgaagatttattttgtgccttggggggcaggagctgggcagcctggggagggctgggcagcagcgaggatggcgaggctgaggccctggaccacatgcaggtcgttttcttcggggtggctggagggcggctctccaggcagctccatggcctcagtagcccccatgaccaagtggagtgaagtgagctgggggaggagtgtcacaaggaggaaggcattgtgggcccctggagatggatgcgttcctgccatgtagctctgggtctggagcccctggagatggatgcattcctgctgtgtggctctaggtctggagcccctggagatggacacgttcctgctgcgtgtctctgggtctgggcagcacctggagatggacgcattcctgccgtgtggctctgggtctggagcccctggagatggacgcattcctgctgcgtggctctgggtctggagaccctggagatggacgcattcctgctgcgtggctctgggtctgggcagcacctggagatggatgcattcctgccatgtggctctgggtctgggcagcacctggagatggacacattcctgccgtgtggctctgcatcaggagcccctagagatggacacgttcctgccgtgtggctctgggtctgggcagcaccaggagatggacgcgttcctgccacgtggctctgggtctggagcccctggagatggacacattcctgccatgtggctctgggtctgggcagcacctggagatggatgtgttcctgccatgtgggctctgggtctgggcagcacctggcaggctttggagtaggccttgcccacagcctgggaggctggggagttcctgtgaagggagctgggtccttctggggagcgcccggtggggcttgttgtccctgccttgggcttgtctcaggaagtgcccccggcagagtgaggaggctgagatgagccccgggggtcggtttctcgaagcccccgtcagagctgatgttcgggccacacgttctcttggggtgatccgttctgtgtcactggactcgccccccgcctcatttcctcactggcccagtagtaactgcagccactggaggcggatacccactgaggctgttcccatctgtcctttatgacggcttgcgatggacccgcctgatgaaggggcccagcagtgccggtgcctgcctagaattcaggatggagattctgagaaccctgaccacggcataggggcttggggtacaaaggaaagaagaggcactaggttctcagagatgctggtgcagtggcttttagaatcagaaagaaaaaatgggaaatgcacgctcacggtagaggaaatgggagaagttgcggaagtctgaaaaaggcagggacatataccatgaagccagcctcattcgtagtttcacttcccccaggtttttttcagtgcccttttatgtcttttaagatgatgagattttcaactgttctgtcttgacatgactctttggagaacgagtactttgagagacattctgaagagctctgagcaacatggtagacccatttcaaaggagagggatggacggatggcggcgtcctgccttctctgccgagaatggggccgccttgtgattcctgtccagaaaatcagcttgggtgcaggtggctgtgttggagctgtggtggcacctgcagtcccgcctgtctcttcccaccctttgtttttgtcttctctggtttcagatcttttgtgtttgtgcatatattttgtcacattgttgcggcctttttcgtagcgttcattgattcttttcattttgcctgtgtgattttgcacatcgcttgtacccttagaaggtccgtgtctacgtagagatcaactatacaaccagattttctattacctattgggcggtttcctttcctccctccctcttcccctccacacccttctattgatctggaattcattttgtctttgggtgtgagttgaagccctgagaggggggatctgtgctctgaacaccagccagttgtcctagcatcacagggaatgattctttccttcttgggtgattgtgacgctccttttaattgcatgttaaatatttacatggatggaggtctgttctgggctgtctggttcctgcagaggatgagtggccatgattgagggaaggtgtccagaaggaagttcccactccttctttcacagtctgatgaggtcctggattcctctgaaggccccggggcccactctgttattcctgtggaggaagtcagcctgagggggagggcgtcgtggtggcacctgcagttccgtctgtcgcattgatgttggctggttctgctctcaaaggcgccggctctgtagtgatgtcagcgccgtgtgacttgaggaggagaccccactgctgcggtgtgtctggggttcatcttcagggcgcagctgataagatgcttctgttgcgctcacaatgccagtcattgcagcagaagtaatggcaggtgatgggagactcattgttggggtgagaaaaggcacaataagctattgtcacaggcagggctccctgtgaagcggaacgtgatgcagaggccactgggcaggacgtttaggtttgctggggagcacagcagcaggggaagaggacagtgaggctgggatgcagcctccatgcagcctgtcgctttctccacaggagctctggcctgggccagactgccgagtcaccctgattcaggagtagggtgaggggcaggctttgttaccccgcgctagtcactggcctggtcattgggtgcaggctggcccaggaagggggctgatgtggcctcaaaagggctctttccagtgagacagttctgggtggcccccggtgaaggtccttccgctggccactctccagagttggcttcagaaggggacctgggggccgcgtggcagcgtccaccaccatcctcacctgctgtggaaatgcactgcagagcccgtctgtcctccaggatgtgaaggggccctggcgggaagcaggcctgagttctgcgctggacaggactgaagctcactcgtgtttccttcttgtcttgcagcgtctcccttctctcctggacagaaggccgtgtcctgggacttctctgatggcgagaggctgcggctgtaccaggtaggcagtgcaggcatggtgtgagtgggttgccatacctggacccgctttaccatgtcatgaccaaggtgccggactcatggggacacaggccccaaacgtgtgcagagcagctgcaggagggagaatgcttctggaagcttctggtgacacttgacctttctcaggcactgcaggcctgtccctcatggcgctctcctcctgtcctcgaagcccacagtgttgtccccagtgtgggaaggtcatttgtcatcctggcatccagaagcccggccccggcgcattcccagaacagccccgtgtttctcttttcagcgaatccactttctgttgccacccgtggaacgttctcactcttccaagaagccaggctagcagctcccccaccccagcagccgcgggacagagcccaggttgggtggtgtgtacacaaaggagggattgttctcacgtcgccctgcgacgagatggggatggacccgcggttagaggtcaccctccctggggcgtcaggggagcatttgtccttgaaacacgctggcaaaaaatgttccaaggaagcctcagctggtgtttgtgaggaagagctggattaaatggtgttctggtaaaatgttcctggaggttttcttggctgttcttggcttttatactcctggttggcaatagaaggaacaccctcctttgtaaagtcggttggataggatcacctacctcatagggcgggcacagcctccagttttttagaaaagcaacatacaagtctttccccaccaagtagaaaggattggatctaagtaaacgctacgtttggatgctcaaggccaaagggggagttgagaagccgcagctcacagtgggattcctttctgggccacgttggaattttaaaagcccttctaaataaagcaggcagctacttgcactgtttcaggtttttctttaaatcctgtaaactgagggtagctgattggattttatttcaacttctccccccaccctttctgtcctgtctctttgttttccagtatctgcctgtgccttaggatggagagaaggtttgagatgttcaggaggaggctcagggcttttcatagtgacgtgaggaattcaggagttctctggtcccagggtcagtcctccgcccactggggcctcagcgacttgaaacacttcagcccaggcagaggccaccagcaggcctttccttataagtgcagcccctggccctggaggctgtggtctctttgggctgcggtgaaccctcctgaaaggcatccacattcctggcattctttctgcctggcattggtcagaaagcgggggtttctaaaatcaaaggcgagcactgcagcttggttcttgtctgtagataaactggagagacaccagggggttgtgcggcatggttctctttgggcccccacatggactggcctcgctggactttgcatttggggcatcgccagagcaggccccatcctgagcaaagcaggaggaggttaatgggggtccctctcgggctccagcagttccttgggcggcacgcatgtggtttgctttttctgaccctgtgccagagttactggggcagcaagacatctgggaagaggaacgggagggtgggacgggtgccgccatcccacagcggtgcccgcttgtctccgtggcgggcacacaggcttccgggagcccggtgagggaggtgcacccagacttgccctggatacagcgggcagagcgttgcatgtgcctctgggtggggtgtaggggtgcttgggggcgtgggtccccacagcagttagagaccatccacaggccaccacactttaagctgattttcgttttgccttgttttcccagaggcatacatgtagtgttttcttggtgcctctgaatagtcacagtctgatttgcctgggggtcagtgagagacacggctacccagggtttccatttccaggccccgagttttgtccgtggcaaatttcgtgatttgcacatagttcccacctcatgggttcaagttgttaacctgatcctgctcccactgtcatcaccatcagaggtagtttatcctggtgcctggtgtccttcaggatgaaggaggcagcagaaatgctccctgactcagttcctgagaccagaatgactgaggaaacaggaggcctgcagcagagcacggccgattgctcctccggggagtgtcagctaggggacggagccggtgcggagatcgaggccccacaaggcctgcccctgtggttgttcccactgtcccactgatggctgggaagggtgagctccagcccccggtggcttgaacaccctctgtagttgtgtctgctcaaggcctgggaacaccctgcctgtttcacagatgagaaactcatctcagagtactcagaaacccagaatacttcattcaagttcaagttcagagggtgattaagaagaatcagaagactgggtgcggtggctcatgcctgtaatcccagcactttgggaggccgaggtgggcggatcacgagatcaggagatcaagaccatcctgtctaacacggtgaaaccctgtctctactaaaaatacaaaaaaattagccgggcgtggtggtgggcgcctatagtcccagctacttgggaggctgaggcaggagaatcacctgaacccaggaggcggagattgcagtgagctgagattgcaccactgcactccagcctgggcgacagagcgagactccatctccaaaaaaaaataaaaaataaaaaagtctcggagcccagcctgcagaccggctgcatttgtgtgtcccctaaaccactcctctgttcctttagcttagctgggtgcctgggggggcacgtgaaccacgtgggctggtaccacaccccctctagactggccaatgggaataaatcatgagccacaaacaggagacgtaaaaatgaacaggtaaacataattttttttcttgggattgtaaattcacacgacagttgaaggtgcagtgaagaaatgggtggtagcggagtcacccactcttcgcagggcgactggccacgcaggctctgcctgcacacctcctgcctggaccatgtggaaagtcttcaggggtcacgtcagactgaggttctccaaagttcctatccctttgtgtgtttggtgagctttttgtttgttggttttggtttcgaggtgaaagtcacataacctccagctgaccgctgcagtgggcattgagtacattcttggtcctgtgtcaccaccgcctctctctcgtttcaaaacttcgtcatcaccctggaagagcaccctgtactcactacatgaccacacccgttgcccctgcccccgcctctggctaccactaattggtttacttttgaggtttgcattgggctatgtccccatggccttcgatctgtgacagagatcctggctttcatacatccttgggacagagaaactaaggccagcgtccttaatagcatgaccaggtctgcttggactgtcctttgaggtgtcctgcaggcactgattctgcacctgccaaggcctgacctccccgtaatcagcagataatccaatagaggagaagggcacttgaggccatgcagcggctgaacgggaagctgtgctcagcgtctctccaagcctctgcattccagtgacaacgtccgcagggcctcagtgaataaaccgctgcaaatgcacgttggtgaggccatcagctgccgaagggaagctggggaatctggacggaggagaaagaaacgtgagctgcactcccggcgacacattggactaagaacggcgcctgccttcttgagaggcttgttttgtggtgtcataactagcctgccttacacctttcttaaagcaagcatgttgtgagttcacaggagggatttttaacatacttgaggctttggggacaaaagacatcagtcaaagaaagattccgctattatttatttcaagagcctttgaatctcttgctgaaatctgctcccattttgaagaagcttcccatcaaatcagaaaagccctgattttcctgtctctgtgtttggaattgtcccccaccctgttgttagttcattccttaaagttgtctgggcagactgcaatttcggaagggcacctggatgcgtttcattcttgggtcagaaaaatacctatgcaaagagcttctgaccaagcatagacagatttcaattattggcacaatagcatgttacataaatcaatttccttgggcctcagttttctccttggtaaagatggaacctgggtctctgaaggttctcaaagactaaaaaggaatctaagacaccctcagacttgctcaagaagaaaacagggcaggattattggaatgatccagaaagagagcacagtgaatcttctcaaactttgagaaatgaattggtcatcaaaaattagactttcctctcacctgtgcagctggctctgtcacgcggcctctgctgctcaccaccagcacatacctggcccaggagtggctgccagtcaatgcgcagcagccctttgcaggacctgcccttgggctgcttttgagtttctgagcatccaagtctcagaagcagctggttgggccagctcaagctctgggtccgctgtggattgattcacctgtacctggtctccaccactgatccatctggagaggggtgaggccacaggggtttccaggctgggggtgtgcctgggccaggcagcgacagccactgggaaccccaggcaataggggaagtggcactcacttatcctcggctgggcttctctgcaggctccctccctccttcccttcttccttcctttcggaactccctacaaccctatcacgttaagcaagtcctgtagcctctctgggcctcacttctcctacctgcttatggagggcccccgagcctgggctgtgtggcttcactgttaacatgttattgatgtgactggggggttgcccctgtgcctgacgtttcattcatgccgttctcccatgcaggttgctctcctgatctgggccccgccctttggttccaggggatatgaaggtcagaggagggattagcatgatccactggccagagtcaataacacggggcccctccttccaagaggggcttagccagaaggggaagcctggatcttgggctcgggctctgatgctttgtctctgagccgctgacatggaggacgtcaagccgcgatgttcatgtccccattgcgtagaggtgggtcctgtagtcccacatgtggtgtgctctgaatctcctttccactctgttggagggtcagagggacttgaaagatcacagagcccagcctcgcatttggcagaagagaaagcagagacataaaggccagggacttgtgccgggtcctacccgctatctggtgccccacacactggggcctgtccccactgccagcagcctctgtgtgggttctgcctttttctgcactggtggtgtctccccatcgccccagctgcttgtgggcaggcgtcaccttgttctgacctctttccttcccccaggcagctctggactttgctctcagtaaacacaacttgattcttttccttcttaccttatcattgcccataaatcccgtttacacggtgcccacttttgtgtctgagctgggacgtacaacctcgtctctgcctccagtttttgagaaattaattataaacagtgttgacagaggctctggcttgacttggggcatctgctgctcttcccggccttggtcttctgaaggtagctgttatcagtaacagaacagatgtgtttatcctgggctcccgggcccttggcgtggccctttgagggggtctgtgaaacccctgaaactgcatgctaaactttacgggtggaggtagttttctaaagagagggtccagagactttgtcagattccttagaggatttgcaccctcaaaaaacgttaacaacctctgagctggaggaaggcctaagacaagcctatcgcacttggagataagataagccgaggcgggacctaatggggcctcaatgtcttggccagagtgcacagctgaaacggagatgacacttgacagaaaccagtgtaaaactctccttccctttatttagcttttatttcttgtgcttttcattaagtacagatactctttgcttgcttacagaacagggaagacctggcttctgaaaattatctttaggtttttcattgaatttggtcttattctgaacaatgcctgaacgtcgaaggtgctcccctagataggttaatagaaacccacagtccagggcaagaggccgcatccgggaagcctgtgtacaggtgactggagagatgagttctcacggaccgttcgggcaacttggtgttccggcctggacatttcagtgctgcatttgaagaggaattatgaattggctctcaaaggagggtgaggtgttttgttttttgttttttattttttttgacatggagtcttactctgttgtccaggctggagtgcggtggcgcaatctcacctcactgcaacctccgcctcccgggttcaagtgattctcctgcctcagactccagagtagctgggattacaggtgtgcgccaccacacctggctaatttttgtatttttagcagagacagcgtttcaccacgttggccaggctgatctcaaactcctgacctcaggcgacccgcccgcctcggcctccccagagtgctgggattacaggtgtgagccaccatgctgggctggagggtacatttttaaacgatgcaattctggggccatcgtcagatttggcgaagaggaagctgcgggagagaactgttactatacaggatttgaagaactctcctgcaggcttattttatatttaaattgtgcacagtggtttatagtttgccaagctgtcttgggtttgttatgttgcgtaatcttctgaaggacaggtgggttgagccaaatattcattagcagcctcgttttacagatgaggaaacttgtgcctcagagaagctgaagtcatcaaaccaaggtcaagctggatgcggtggctcatgactgtaatccaagggaggctgaagcgggcggatcacttgagtccaggagttcaagtccagcctgggcaacatagcaaaacctggtctctataaaaaatacaaaaaattagccagtcgtgctggtgacacttgtatccccaactactcaggaggctgaggtgggaggattgattgagcccagcaggtcaaggctgcagtgagctgtgatcacgccactgcactgcagcctgcatgacagagcgagaccctgtctcaaaaacaaaacaagtaaaacaaaaagggtcaggcatttggcagggatggaccccagtagaatcttctgatcccagtgccgtgacatagggtccccagagcagatgggctgggttcagataacggaaggccacacaagattctagaattgtcagcagagggaggagttgcctgacagcagcagattccagggagggcccggatgaacctccaacaggaatgctgattccgttctgcctttgatctcctgatttcaaaagaacttgaagtaacttgaacctggctgccatctgcccaggcatagatgtgtgccaggaggcaggtctgcctcttagttgctatgaaatagtttgcccaacttggatgctacgtttctttagaaaatcttcaagctatcacacgtgaataggcttctgatcgaataagcccagggcttcggtggatggggcatggctggcagcagggccagcgtggccctgtccttttggtcctctgtggcagggacccaggaagcagtacccaagggctggaaccagcgtgaccgaggagaactctcccctggccagggcctagctctcaaacaccagattctggggtggacttagatcctacaaacgcaggccactgaggccagggtaccaatgtattcatttgacaggaaaaaaggggatactttggaggtgcagataatgcatcctcactgtacaggtcggggcatgagagcagaatgagggtcattcgaaggatagagtgtctgtttactgttttatctgctgagaagcagattcccattttgccagcacctgtgtgtagcctggactctggaactaaactctctggtctgaggggtggagggggtcaaatcttggtgaggaacagttgcatggctctgctcactgacctctgttgggccttagtttgctcatctgtaaaacgggagtgagaagttgcagttatgggcgtgtgacaccttcccagtcacgctcctatgcagggagatgtggctctggcatacagaagctgaactcacagtgatggtgacagaggctggaggctggggggcttgcagtgtctgtatccagttggctccagggatggccccacccctgtcctcacctcggtgtgattttaggggccacagtctgttcctgttttttcttagctggtttgagttgggttttgagagtcctaaaacccacccaagatggccctaggtacctgccctctgtggggtacattgctccagtgggactgcaggctttggggctccccgttagcaccccaactgctcccggctcctggctgtcactcggtgaagtttgccacggcttcccctgttggtggcgtttttcctgtgcctgactgactaggtaccctcctaactcctaactaaacataggttttctttttctatgctttagtagttatttctcataacaaaaatatgctctcagtgtcacagttatttttaataaatgtatctttccagactgttctctgtgcatgtgcataatattttagcctcagatgggttcctcatgggcaccttcttaaggtgtcattgcctgtagtcgcctcggtggcactggacctctttagagtggctttgcttctttacagggtttcattattttttttaaaaagttttattgaaatgaagttcacataacatataatttaccattttgaaatgtcacaattctgtgctgtatagaatattcacaaagttgtgcaaccaccacctcttatcacatctccagaacattttttcaaccctaaagggcacccattagcagtcgctgcccctccttcccgcccctgacaaccactgctctgctttcggtttctatggattcctatggatttgtgtatcctggacatgacttataaatggaaccatacaataggtggcctttggtgactgtcttgttttcactgcagactgtttccagggttcatccacgtggcagcatgtgtcaaaatcccattcctttttatggctgcataatattccattgtatggctatgttacattttgtttacactttcattcgttgatggacatttgggtcgttgccaccttctggctgttgtgactggtgctactaggattcatgtatttgatggtctaattctgttctaagagctgtcttctctcatttccaagttcttggagagatccctggcttttgattccttctcctccaccccatgcctatccccaggattttatgaatctcccaggaggtagggcttggtatgttgttgaactcactgttggcatggaccagcaagggtcgctgtcacataaaggcctgtgttaggtgccatccgcctgcagatccccctgggtgttaacacaggactgcgaggaagcactgcttgtggagagcaggatagtcaacaacagacctaggccaggtgtttgcccaggtgtcacacaggaggcttgctgtggaaaggcagcttcctgggcatgccctgtgctggccatgtctgtctgtctgtctgtctgtccctcccagccctgctgtgctgttggcccagggagtggtctgaattggctgtaccccagggggctcccctgacttctggcttgcggtggagagggaggtgtcaggggagcccctcgcctggggctcactccggctcccctgactgggggtccctgtctcccccaggttccagtggaggcttcccccttccccacttccctggcgtcacttcccccaggggtcccttcactgttgtaaattgtccctttcctgttggggccttgagtgatgtctcagccctactgagtgaagatctccaaggcaggcccagaacctgcattttaacaaatcttcccctgacaccttgagcccctcagagctgctgaacccccgcctccgccaccctgcttagttgttgatcttggcttcctcgtgtccaggctacaggctgacctctcttgtgcttctgcctttcagagcttcaaaggaagcacatgtttgctgaaccctcccagggatccaggctttgcaggtttcacacacatcttacaaaatgcagtgggggcagaacgagaggagagccagagcatgctggctttgggaggggtggcccattgtaaacaagccagccctggccgtcccagggtcccaggcaggctggcttggttgggtctacacacagccaagcactcttagctcctgcaattggaatcccgctcttgcgtgcccgcctgtgttcctggctgtgggaggcgccagagggaggttttgatccctgggggagtaggaagccggcccagcccctgcagctgtctggccccagccactaatcctgggcaggagccgcctgtcctggcatggtgctgggctggctggagtggagtgacctgagaatggggcctgctttgtacccagagcacacgccggccacggcttttacgacctagcgagcaggacgggaaaaggccagcaggtgggagatgggagtcagccttggtctcctttgtctttgcgggctttgttccgcgaggattttttctttcctgcccttttcctttgggctgagcgtgagtgtgttcagaaaatctcagagcggccacttgctgccccagggggtatcatacgcatcatgggtttggtcaagagtggatccatcaaaaatctgtggggtagcattttttaggaaacgaagcatagtgccttttattcctaatggatttttagctgtgatataaaagcactcccggaaagaagccagcggatgaaggtcccgatggtgctgggctggctgcaggcgggaccacaggactctcagaagcagagggcctgtgctcccaagggcctgtgctctcaggggcctgtgctctcaggagtctgtggactcaggggcccccctcgctctgctttgccaggggccacccagcctagatttctgctgggccagcaccccttgggctctccgatgagactggcaaggccaagcatgtgaggcctgttcccaaatggaagcgtccgtctgtactactgcacggctgccaagaccctccagctctgaccctccatctgggttttgcctggggattcaaagaggggctgggttaggggagataaagggagggggactagggcaggacctccgtgacagcagcaacatggctgatgcacctggtgtttagtgaagaagattgggggtgccacgccgcatctgtgtgtccttagacaagttcattccccaaatccattccatttcctctactcatcggatctgcttcagagacttaaacgagctgacggaacatttagcacagggcctggccacgggtaaaggatgtcatcttcccccggtcagaatggaaatgaattccatttcctagggtcgggtgagcccacacctgtgaaatcaagtagaggggagggaggggagggagtggaggcagttgagtgggagagtccaggtgagacaggtgagtccctgcaggaaggcaggagcaggaggcacagaggggagctggtcagagatgtcagagatggagagatggcaggtggggtccagagcagctcctccctgcttcctccaggttgcagtggagaccaaatggcctgaaaagccccagatactgactctctgatcctttaccacagagcttctcacctggggcgaccttgcctctcccagccccccagggacacttggcaatgtctggagatttgtgattgtcaccacgcagggaggagggaggaggttccaaccggcatggagtgggtagagcctgaggacgctgctgcagatcgtgcagtgcccaggacagcccacacaaagatggatccggccccaaatgtcagcagtgataaggtggagaaatggttttccagagagtttgctgtttcacctagagaattgattgactggttttggaggaaggaggaatttaggatgagggatttctgggcgctgccagttgctaagtggggaagaagagaccaggcgtgcagtgcttgagaggctgcggccatcctgagcccgggctgcggccatcctgagcccgtgggggcagttatgggtagtgctgaggaggcagggtagagacacggtttggccatcagcagagatgcccctagccatgcccagggtggactcaggcacccgaggagaatgcgccagcgaggagaccagcagagcagggatgggcaccggagaggttggacgtcaagggcagtcaggggaggagaccctctgaaggaggccaagaaggaccagccgttgggggtggaggatgccgcgtgagctgcacccctgtgggaaagggagagtcgcagctgggtggcttggaggtttcagagctgtcaggaaagctgccctgggacttggccctctgtgtggccttcctctccagactgggtgggaacagtgtcgtgagccattaggtgggatctggtgcccggagaggtgtggcacagcttgaggggccaccgcaggatgtgtataagctgaaaggaaggaggcctgtttgccaccctgacctcccagctcagccagcctgaagccctgggttgggacagccccttggtgggagggaggccctttgatgcagctggggctctgtggtcgcctggcatgagctctgggctgcagcctccctgcagggcccaggagggccagagagaaaacgccaggaagaaccagccgaggcctactcaggaaccatggcgaaataaagcaggaggcggagaacgcttgaggtgctacctcttgtaccgcttctccttgtaggtggttattttctcctcattctctttttggtaccctttgtgtagaataatgctccttaggtactttctagttggagacaagaaagaagcttctccaagctccccttggttctggcagtgtcctctggctctggatcactcttggtgccctttccaagcacctctccctactcgctgtaaaaactccaaggcaaacaagctgtgaattatcaaaaggccaccggcctctggtgaactcattctcccgctaggaaacctgttgggtaggttttgttctattttatctccacctggtatgggcttgtagcagaggccctactgaaaaacggggtgattcacacactttgctcatttatgctttgctttaaaaaagaaagcaatgggagcagctggctgctgcctgcctgtttttgtctgactgtcctgtaagctctaccacaccagcacaacaccggggttccagctggcttacaggggctgggctgacatttgcccaagggacaggtggacggacagcttgtgttctctgggattgtctagaaatcagctgatttgcataagaatgtttccccatagctgagagcttaatgttcatcactgacccattggtgagtttgttgaaatagagatggttccgggtagaatatacttgcctcctagcacctgaaggactattacttgggataaccaggcttcccagagtgctctctgggccctcctgctgcccagctcccctctgagctctgcaggtgccatccggcctgcagtgtgtgtctgtctgccgtgggcctccactctgcaaaggcagttgtcccctccacttccaaggaacaaaactcagaggctcgctccagtatggtgggatggttgaaaggaccaaagtgtcactgaatgagccagagataagaggatcttaaaggagagtttgggagaggggccgtggtgtggtgtgcctgggaccctggaggacggagctcctaggtcattgtgtctaagagtgctttggggattcagctccttccgttggcctccattatttcttggcttctctgttgtgtctcttctctctctccttggcctctttctgcatctgtgtctgctctttgctagccggcctgcctttggtggtaactgttctctggggtcttgcccttgactcttgcctccttcccatatccttgatctggatctctctatggatctctccccaaatgtctattccagatctaatcaagatttacctctcactgccagagccatgtgtttgctcctcacgtgggtaccctatgttggcatgtccaggagaaaaccctctaccttcctttttctccatgctgcccacattcagcctattttggagatcccagctaagagcgtctttgtggtttccgctcgccacctccatgtcacccccaggaccttcctcttgctcctgggaaagtgtgttagtctctcctctcctcaaaccttccctgccgtggtatagatgctcagtcacctccttctggtgagtgctggagcttcctggagggtcttttttcagggttacctcctgcttgtctacccttcgtcccatccccgggatcccccaaactactgagggtgtatcatcccctccttggcagcctgacttgcagattagagacccctccccatggtgcacacggcccctatggctcccaccccaggttttctccataaaccttgagccagtataccttcatgcaccagaaatgatgggtgtttctgtgagccccctttgctctgtccctgggcccaccccacttcatctccagttgcctgtctgagtcctgtggcactgacctcccgtgctgggcccagcctgcttcatggggaggcccgcagggcaagatgcacacagtaggccccagaactactcggtccagctgtttggtggctggaaaaccttggacaagaggcttggcttctctgcatctcggtttcctcatttgtgaaatagaggtcataatccttatctgtctcatagggcacttgtgatacacaaatgaattaacacattgaaagcttttagaatggtgcctgacacacacccagcagccaatgaatgttgcagggcatactggttccctagggctgctgtaacacagtgccaaggactgcgtgccttaaagcagaaacacattctcacagtctggaggctggagcctgaaagcaagatgttggcagtactgtgtctctccaaagactctaggagaacccttccccgctctccaaggacaacccttcctccctctcctaggagaacccttcctccctctcctaggagaaaccttcctccctcttctagaacccttcctccctctcctaggagaacccttcctccctctcctaggagaaaccttcctccctcttctagaacccttcctccctctcctaggagagcccttcctccctcttctaggagaaccctttctctctctcctagaacccttcttccctcttctaggagaacccttcctgtctctcctagaacccttcctccctctcctgaaacccttcctccctcttctaggagaaaccttcctccctctcctaggagaacccttcctccctcttctagaacccttccttactctcctaggagaacccttcctccctctcctaggagaacccttcctccctctcctaggagaacccttcctccctctcctaggagaacccttcctccctctcctagaacccttcctctctctcctaggagaacccttcctctctctcctagcttctggtggtttttggcagtcttcgttagcttaaagccacgttccttcaaaaaatatctgccttcattgttatgtggccctcttctgtctgtgtctctgtactggatttaaatttccctcttataaggacaccagtgattggagttagagcccatcctaattccgtatgacctcatcttaacttcgtcacatctgcaaagactgtatttccaaatatggtaaaatgtacaggtaccaggagttaggacttgaacacatcttttggggtgactcagttccacccataacagtggctctcgctgtcttccctggatcgtagtctctatgatagctctcatctgtgtctttgtcatttccgtaaacctgctgagaacagcgacagtcttgcttttctttgtattcctggcaaaggctcagtacctgtgtatttagtgaatgtccttcctctcgacttacattaaggaagactccagttctgataactctctgtttgtcagaacatatgcctgtaccagctggaaatgagaaggatatgagcataagaagtcttgcttttgggaagcagccccattcatatacaaggagatggatgggagccaccctgaagccctccttgcagttgattagtgtccgttgagcggttgctgctgcattccaggctctgggtgggggatgggattctgagagacaggcatagcccttgctgacccggagcacacagcttggctggagagacacacaattcaataagctgttacaataaagtgattaggtcctattatagggaaagcatggggctggtgcccgcacactcagtgtggatgcagggagcagcttattggtttaaacactctggcatcttccctccagctgctcatgaatgttacggggcgctgacagtggctcagggtactggcagggacagccagcccagaggagacacaagaacggcaactgggatgggaagcgccctgacctcggcagaccatccctggggtccctgctgcacacagcacagttcagtgattgacagccacagccagtgacccagcgtcttcaccccacagacaggtcattgctgaccaggctccacttacacaggttgagaagggtggtggctacaaatgtgtcctgtaacgttctataaatgggagccgaggggacgcctgagttgtctgccaagttttcttcctggttgtcatgtttggatcattgtacatcccacctaaagaaagcacaccctgtgtctgagtggggacaataaccagccgcaccgcaagggagggctcttccttttactgccgggtgacctgtgtgcctgcaggcctggcctgaccccaagcctcgctcatagttccctcctttcacctgcctggccggctgggctgcagtgcctgcagggtgcaacagctcttgctatcacccaccttactcctcggagtgcattacgcacatctaaccctaaaatgcgtttccatctcggagtgcattacgcacttctaaccccaacatgcatttccaactcatgccgtgccattgtcccaacttagtccccactgtggtccaaggagcaggaggaaggagacagggatgagtttttaatattttaccaaggatcaggtgagaaagccaaggaccacaccagatgagtgcacaggcctccaggagcagggctggcctttctgcgcctaggctgtggggctggaggccggacgccgaatgtgcacgctccctaaatgcagatggtgacacagcttttctcccaggctgtggaaatttcagcccactcacaataaaaagaaatgtttccaaaacagcctttctgttccctggtcttttcccagaatgaatcttgcatcagcagaggtgagattcagttgtgagagaagacacattaaaaccctaagtgctgactcgcaaggcacatctggccagcgtgggaagggaggaggtcttcaggcctccgctgtccgagtggctttctccctggcctgtgtggttcgctgccagcccttcctcccttctgtgcagaaggtccagcccgtgttccccacaatcacgcaggaaccttgtgtatggagctgttcccccttctccagttgtctccggtgtctgggcagtccatgtgcttcccagcactcctgcaggctggggtctcccgcccttggctggttttcactcagctcctaccagctgctggaaatttctccttggagtttgatcttagagctgtgactagggatgggcactcatttgcattagtaattattttgttagttggtgcatataccgctgcagacgagttgggccccaccaggaggaacttgattttctggggagatcaacactgcctcaagagctcccaatgtaactgttggactgagggtaagggggttttgcctgcagtcgcttccagggtctccgttctgctctgtccttttattcccaagcctctccccccattttctaatggtttgagcgcattcctagttaattgcaatgttcagatagttccagtatcttagtgaaagttagtgtgaaagccccagtgatttggttgccatcaagaaatgcctttgcccagggtcacctggtgagtaagcggagtgtgaagattaacctctttgtgcctcagtttcctcagctataaaacagaatgataatattaaccccctcctaggattgatttcagatgcaaatgattactactatctaccatatataaacaatgtacttatagaatatatgtgtattatgtactattgttttctataaaattgttatttactaaaaggtttatcataatattattagctattaaagtatatgttaatcaacttaaaaaaaaaagaaatgcctttgcgtggctcttacggtgacatagcaggattttataaattgcacggtggatatagaggtgtaattacccgttgcctgccgacatcagcctgatccttcaggaatgtttggcgagcaggatcgggcgatgccggatactttgggctcttaggaaagtccactcagcgagcgtggaggctggccgagttttgtggtggaggcctcgtccctctttttggggagcttaccctctgtgtgctcttggagtctgcattgtgttagatgttggaggcgctggggaagaagtgcccacatggcattgggggaaatgagttctgagaataggggtgtgtcccagccttctcagttttagcctttagggaaatgtttgtttcctggggccaccataacaaagcaccaccagccaggtgtcttccccgtggacatctattctcagttcgggaagcctgatgtccacaatcaagtgtcagcagagctgttcctcccgaggctgtgagggagaatctgtcccattctccgctcctggcttccactccttggcatcccttcttggcttgcggttggtcaccttctcaccgggtcttcacatcacctttccttgtttgcatctctctgtgtccacatttcctctttgtataaatgaggatgccagtcctattggattagggccccccagtcacttcatcttaacttgatcatctgcaaagaccttctttccaaagacagtcacatttacagctactggggatgaggacttcagcatctttagaagggacaaagtgtaataaaacaatgggaacatagtgacttctcagtattatcctctccctgacctggtggcatttaggttttagccaaaaggtgcttgctcacaagcatttctgtgttatcctttaaccccttgtttgggccttaaatggctcaaacaaatgcaaataaggtgcagtgaatattgctaaaccttcactatgcgcagcccatagttgccacagctgtcagtggaggtaaaatttagtaattgatcagtagttaataaagaaatcatactacccaatttaatgaagcacctgttaacccaatctggtgtaattctttgcattccagaccacagtggaacacttgggaagcagcaaggctgagtaaaaataagagtatgtcaaacaaactttcacagactttgagctattattgaggaaaaatgtagggcctgggtgtgagctgggtcacgatgaacctctgcagaaggctcaacttctaacctctgcagagcatgccccaggcctgtgccacattatctcacatgggagccctcgctgctgttgtccctccctatggtcgatggggacagtgaggcacagaggtcagcgacttccccagatcatgtgactgataactgcagtgcttaggcatgactgcagggctctgtggggaatgcaaggatggtttgagtccagtgttagcctgaaggaccagcagtgagagggtttcagtgactgtgatgggtacagctcactctggtgagccagcgtttcccaggcgggtagaggaaggttgggaagaaagaggctgtgggcaggttcttgaagatctgagtggtggggttggccagaggatggggctggctgagaacagataaaggtgtgaaccatctgggaggctggttatttaatgtggtgcccagcctgtctcaagagtaacacgtcatccagggaagctccctctcaggtgtcctcctgcatggtattgccagaaagagaccacagccatgggcgccttgctagttgatcttgagagtggctgagctgggtcagtatgagaaaggtgcaaacgatgggcctcgtggggtcccctgtgctcatcagcatcagtcacatgggggtacgtggcagagatttgggggacacacatttggctgggattaagaagctcagattaaagcgatagttctgggagagttgcttccccacccagggatattaaataatgtctggagacatctttagatgtcacagcaaggggtggggggtggggggaggagaagtgaggggagaggggtagttaaggtggccactgcactgggcccaggggagcttgctgtgatggacgtaaccacatggacagagacctgggccaaaaacacgaggcacatctgaggaatgaaagtaagaggtgctttgttttctgctgcttctgtgtaagaagggatttggaaggccaggcaattttcctgtaagtcacctgagcatgtgttgtactgggtgtgctgcggtgttgtacttagaaagggaacactttcctctgtgactggaagtgtctggtgatgctgaatgctaagctgggcctggggagttgaccgccctcagcaccaccgcccattcactcgtcctttcttttcttttcttttttttctttttgagacagagtctcactctgtcaccaggctggagtacagtggcgtaatctcggctcactgcaacctctgccctcgtgagttcaagcgattctcctgcctcagcctcccaagtagctgggactacaggcgcacaccaccatgctcagctaatttttttgtatttttattagagatggggtttcaccatgttggccaggatggtctcgatcttctgacttcatgatccacccacctcggcctcccgaagtgctgggataacaggtgtgagccacctcaactcatcttttcattcacccttctatctgtctgtgcatccaaccatccatccatccatccatcccttccgagctaatgcagagatgcgggtttctgtctatgggggatggggatgccacttgacacttcccttgagagcaaaacacgttgacttcagaagatacagggaacacagagaaaattacaagcaacaacataaatcacccagatctcactttcggcagcgagtttctgtttgcctttcttttttttttttttttttttttttggtatatagccttctcatgtacccaaagaaaattgagactatgctatactattgtttggtaaaatactttaagacttaatatattcacatttctcgtattttaaaatcctctcctggctgggtgagatccagcactttaggaggccaaggtgggtggatcacgaggtcaggagttcaagaccagcctggccaagatggtgaaacctgtctctactaaaaatacaaaaattagccaagtgtggtggtgggcacctgtaatcccagctacttgggaggctgagccagagaattgcttgaacccaagaggcagaggttgcagtgagctgagatcgtgccactgcactccaacctgggcaacagagcgagactcagtctcaaaaaaaaaaaaaaaaaagaaatcctttcctaagccatattaatggctgcttggcattctgtcatccatagatcagactttaattaatcagtttcaccgtcatctgtggggttatcttgagcttttgtgtctggcttcccatctgtcttctcaggatgagtgactgggcataagttgctttatcgacatgagtgagcattgatatttctgcacacgtgcttatctctcctgccctccaggggcccagtgtcattcactgggtgccgtgtgtcaggccccctcccctgctttttcatatgggtgtagtgttatcagcattaaaatccctctcaggaaattagaggcagtgccacattaaatctgtaatgaattattttagaatgttggttttaggttgaacgacatcaaatggttgatattcaaccagtttttttggttcttcctgaaacgcagcaagactcttggtgggtccactggagcagaaagcactgtaggtacctagtgtcttgggtcctatcaacaccacctacataaacattctgtacggaagtgagacacaggccctaattctggggccctggcagatctccatggcccagggtgagcgggggcagacgagagcttacagggtcttggattacctgtgttcaagggtctaagtggcttatggtgtagccaaacccttggtgtggggcagggaggttgcaggaggaagaaagttggatgaggtgattgtttccatgtaacttgtatcagaccatggccctgagttcattctacagagtctgggtgcttgctgggagtgaggtgcagttccagaagccaggggattgggcagggggcttggtagagcaataaatcaaacaaaacagcagtccctgtgcctattttagtctcgtggggtacgggtacaggctgtccctcccaggccagtgtgcaatagccaggttcaggcctctgggcaggtgaataggaaaagctgccacttccctcttaaacaccaatgttagttaccacagcatctagcatgcttctggcataagcttgccttcagggaggctttattgaataggtaaatcattcttccacccctccatgatctttgcaagcaaacattcctgaaagttttgagcaaaaaagataggtattattacgagtaatttagatgactgttgtttccacagtgaagtacttctgggagaaagggaggcaggactggggtgctctgggggtcccctttggtgtgcaatgctgcctttgggttccagttacttttttaaacccattttcctgagtgactgagtcatacctggtgttgttctgggaatcggggcacatctgggaacggagtttgttcacggagcttaccttccagagggagccaggaaatagacaagacctaaagacaaagctgattgaggtaagtcatgtgccctcaagaaaacagcaaaacccgctgagcagggctgcagtggcgagtggtcagatagacctttctggagcagtgacactggcctgagatctgggtggcaaaagttatcagccaagtgacgttctggagcagtgcttgcctgccagagggaacagctagtgcaagggtcctggggcaggaacagttccgttgtgcaccaggaaggagcaaagtcaggcagggcctcggggcctagtcaagaggtgaaattttgttctgaatgcagcgagatgcccttggagagacttaatttgcagggtgccctaaggagaatggttttgttggtgggtgggtggagggagtggaaccagggagcccaggagggcgctgcagggcactcaggtgagtgatggtgcacacagccgggagcaggtaatagagagaggagatcagactggaatacactggcgatcacactgactggacacagtgggctggattgggggcagaagaaagggagagatgcagggaaagcctcttgtgtgaggatgatgggcttgacggtgggaagggcgaattttttttttttttttttttgagatggagtttcgattttgttgcccaggctagagtgcaatggcgcgatctcagctcactgccacctccgcctcctatgttcaagcgattctcctgcctcagcctcctgagtagctgggattacaggcatgcaccaccacacctggctaattttttacttttagtggagatggggtttcaccatgttggtcagtctggtctcgaactcctgacctcaggtgatctgcccgcctcagcctcttaaagtgctggcattacaggtgtgagccaccacgcctggccagggaagggtgagttctattgtcaccactgtttctgctgctgctaccttctcaatctagaaggtggtccattccattcctccttttccagatgagagatctgaggccagagttcccaaactatactctaaagattcttaaaaaaaaaaaaaaaaaaaaaaatctttaaaagagacaaaagcaagttacatgttctatatggaaatgtttttgtaaatgatatttgaattgattattgatcagattatgagaaagaaactcaagctggagcttgtggaccccccgagggagagccaccgaatctaggaagattcttctttgcgacataagagaaagaacgggaaaggcagtgaaacagacaccactgagctgggcagactctggcttgccctgaagcaggtttgtaggaatgggtgtctttaaaacaagattttagttactgaattgaaaatgcctagatatagaaataagtgacttcttgaccaggttcagtaactcatgcctataatcccagcactttgggaggccaaggcagcagatcacttgaggtcaggagttcaggatcagcctggacagcatggtgaaaccctgtctctgccaaaaaatacaaaaattagccaggcgtggtggcgcgtgcctgtaatcccatctactcaggagacaggggcaggagaattgcttgaacccaggaagcagaggttgcagtgagccgaaattgtaccactgcactctagcctgggtgacagagcaagaccctgtctggaaaaaaaagagcagaaaaaataagtgacttctcttttgcagcaataatctcctgaaaatataatcggaaaaggagacggcattcatggcgatgacaacatccaaacccaaatttaaaatatcataatgtattaaaaatgttttctgcaaagaaaacattttgagtcctcttccgactactgctgttactactacagctagtagttgttggtggtagtgctggtgttacccaacagttataacatcaaccctagaagaagtgctttttgtgtacctattatctcattgtgttttcattgtttccattttgcagctaaggagtcctttcaagggcaagtgatttttgtcctgagcctcccagctggtgattggtagtgccaaggccccaagtccatcagccagactctaggcagagtgtcccaccctcataatcttgacaccagggaggggcaaactgtagtctgcctcctattttttataaatacatttttgttggaacatgatcctactcatttatttgtatcatctacagctttttttggaccacaagggcagagctgagtctttgtgacagagaatatatggccccacaaagcttaatttactctctgtccctttacaggaaaagtttggccgtctctgccctacactgctctgggactcatatctaaatcaatggggacccaaccacatttgtggaagaaaagatggaatagtataaagatgtcacttcttgtaaagcagtacccaggaaatcccagtgggaatatgtttttgcacaaatgagatggtgggagacattttattaaattattctaaagtttatttggaagagggccgggtgtagtggctcactcctgtaatcccagcattttgggaggctgaggcatgtggatcacttgaggtcaggagtttgagaccagcctggccagcatggtgaaaccctgtctctactaaaaaaaaaaatacaaaaaatattagccagatatggtggcacatgcctgtaatcccagttaggaggctgaggcaggagaatcccttgaacttaggaggcagaggttgcagtgagccaagatcatgccactgtgctctagcctgggtgaaagagtgagactttgtctccaaaaaaaaaaaaaaaaatgataataataaagtttatttggaagaaaaaaaaggtaaaaataactgatgggactttgaaatagaatagtgcatagaagccagaccttccatgtagtccaacacagcagaactatcatggttaaataaaggttgatattgtggtaaatataggcaaactaatgacacagaacagccccgattcagaccctagtgtctgtacacatttaaaaatgcattaagatgacatcacatgagtcagaaggggacaaattgttcaggaattcatgcaggagtaattgctcatctgtttgctagttaattttgtaacatccctccccgagaagcaaaataaattctttgtacattaatgtcagtccacaaaccttttatttttaagtaaaggaaaatagatgtgaatgtttattgaatttgtcatcaagggaggcctttctgtgcatcaaggggaaatgacaaaggaaagattgatatgattaaataattgagactttatcaaattaccaaatggattagtgcaagcaagcacagagtgggggagatatttgcagccgacctgctgagattttaggatgtaattgagcagaaggtgcaaaatgataatccacaaggtaggacataagaagtagttgctacttggccgggtgtggtggctcacacttgtgatcccagcagtttcggaggccgaggcgggcagatcacttgaggtcaggggtttgagaccagcctggccaacatggtgaaaacccgtctctaataaaatacaaaaattagccaggtgtggtggcgcacacctgtggtcccagctactagggaggtggaggcggcagtgagccaagatcgtgccactgcattccagcctgggcgacagagcgagactctgtctccaaaaaaaaaaagtagtagttgatacttgaactatttctgactaatggtcaaaggagggtggattgaaatgttgaaagcgggtgaatcgagacattgacggcccatcccctcgttgtcagataagcaaggcttttcttgacctgctagttaggggtgagaactggacacccgccgctgttgagaggatggattgtcacagtcttccaggactgcttttggcaacccttcctactctacttgaaagcagtcctaagaaaataacccaaaatatggagtatgattagatacaaagatgatcactgctgtgccacttacactagcaaaaatgtggcagtcttgctgggaggagcagggtcagggtggtgctccctctgcagagttgcagttggggcctgatgggtctggttgggccccactccttgaccttgtccctcctcacatctttctagccagtagcccatgtctcctacttagtggagtaataaggccaggagaaataggtgtacctttattttcatgtaacggcaaaatgactttccccaaatcacagagctggagttgggaatcctggagttagatccaccaggattagtacacaattagaggtgctcagtcaagtatctgagagcgtccagaatcagctcagctggcctccttttcacttgctcgtagcatggccttacaaagttgcaaagacctgctggaatcaaggcctcatatttcagaataataatgggaattcaggctgggcacggtggctcacacctatactctcagcactttgagaggctgaggcgggtggatcacctgaggtcaggagttcaagaccagcctggccaacatagtgaaaccctgtctgtatttaaaatacaaaaaaataactggacatggtggtggagacctgtaatcccagctacttgggaggctgaggcaggaaattgcctgaacccgggtggtgggggttgcagtgagccgagatcgcatcactgcactccagcctgggtgacacagtgagactccatctcgggcggtggggtggggggtgagaagaatggaaattcattttataaaaagcgtttttgattgtagaaaaatcttaggaaaattaagaaaattttgaagaggaaaagagctctccatacacttgctacctagagataaagttagcattcagtgtggaatttactcttctttttctataaaaggtatttttttgaaaacaaagtagaagattttattatacaatctgtggatttaaatttttaaatattatgttgtatggattttccattctattaaatagcctaagaagaattgtaatggctgcacagctgtttctggagattcggtgccctcaagctctgtgtgaggaactaggttgctcccatctccatgtcaccaagcactttatctacgtctttgatttcctaaagacgggtatattgagggacagtgggaggggaggagggacaggaattctgtcccctctcattttcttaataaatattggtcaaggatggatttttcattgcttttttgctctagatatctcgattagtaattgatggacatgtgagctcttcagtaaggaaattcattcattcattcacaaattgtactcattgcttagaggccagattcttgataaactggtggttaaaactgcagttgctccctttctttgtggctgaaggtctggctgagaggcagaggctaaaacaataaactaacgagtgacaccttgcaaagtcatctctcctaagcgacgccctgagggcccatccacagtttgcatgcatggggttggcaggtcaggcatcctggggtgtgttggcgctttttcagcagatccactgggtgggctttgctttctgcttgtggctttttgcaacgactgtggcatcctcatggctgctttggcttcagggctccactcacgtcctcacagtatgaaattccttgagcctcagacatggcatgtgtgtgtcactaatgagaactgttggtagaatcaggaacagtattaaaccctagaagccgcctccccctctccagcctcttcagatccagcattttcatcagggaaagcccctttcaataaaagtgaggcctcagttttctcatctgtaagatgtatgtgtggggctggctagctctgcggttttcagaatggcacctaagatgcactttaaaacattcctttgagttaatgtgtactagaaaagatctatcaagttgtaaaaagcgggttgattgataaagaagtattaataacagttgatttttttttaaagaagatggtaagtcagtgagtagtgtttggagggcacaaatccttccagtgccgaagctttgcggtcttaagtggcaggtgggagccgggagtctgagtacaaccctctggccagccccagtcaaatgaatgggcctctctgcttgctgctcttaaaacgtcttcagagatagttgcactttttatttctggtcactggctggggaccagagcttggaagtatttctggtctgggctgatcacagggtcctgcttcacagcctgtttgctgtcagccatctgacacgggcgggccagccttcccatgtgattcaagggggctgacagcagcccattgccacaaatgtctgcctaaaccccaggcttgatgagcacttgacaggtacacactggtgtgtctgtgagctcttcatgattctcagcggcagggtgagggcggggaaggaagatgtaggtgaagagctttgacccaggagcgcactagggaagcgagccaaggtgtctgcggacttccagtcccatccacacccagaagacatggtgggggcccccacccctctcctgtggcattggtttcatgtgtgtgtctttccagcttaatgataagcagccgagggaaggtccgggtcctgctttcccttgtgtatttactggtcctgaatgcacgtgatgctgaattaatgtctgagcgcaacagtcatccgtgccacagatggcaccaagcaccaagcttcggaggcccccgcagtctgtgggagacaatccaagcttgggctgggcactgcgctcaatgctggaaaattataaagacagagcagccaagtcaccagctttcaaggaaacgagtgtagttagggaactaagaaaaaataacaagcacgatgaacagtgcgatgcctgggataaaagcagtaaatgcctagagatgatgacgggtgtccaggagagctaggaaaagaggtggacttccatttgcaaaggcaaaggcactgtttcagggggtcattctccaatcggtaggttttgatgttatagaaatggggagccctgttgggtcttcaagaaagtgggtgggaagaaaggcacaaggtctggagatgttttggaagaaacagtagctgtgtttggtgagtgcatgggatgtacggaggaaggtgtgaagaatctggaaagcttagaatgtctcccacagactgtgggggcctctgaagagtctgaagtaatggttgctttgaatgcaaggagattctgggatctgtgcagtgtgctgagaacaaccctacagaggggatgggggagggatggggccaggaatagaggaagcagaggagaggggaggcaggaaagggaggaggccaggtaagaagctcaggccttgaagagggattcacacgccctcccctcctcttcctgacctgtcgggggatccccagcctcagatgttctcagtctggccagtgaaaacatctggaatcatgactccagccgcgctagccatctcactttttacaataaaaactgagcaagcaaggaacacctagtgacgactcatggcccttgttttccccgcatctctggagtctgagtcaccagcttggcacccacagttaagccttgaatgtgtgcaagttataacccggtgtctggcacagagaaccttagcgctccttcccctccaggtcttccattcttttgttgatttgtctccaatacgggttccctcaaaaccaactctcttccatttatttctgtccctagttttgagcacagagcctcgttgctagagcctggcactccgtagatgttcactaaggtgacctctgtgcgtagtcccaggtagatgtggcacccaggatatgcccacctttctcaaactcagactggaacgtgtggtcctgccctcgttcctcattttttcaccctgtggcgtggtcttggctctgaataaccgctgctacctcctaaattgaactcagttgtttagggaaatgcacccagaggggcactgtgagtgagtctgatcggctggcgtgcctgtcggtggctgcccatgccttccgatgggccttgctgttttctcccccaggaagaggcagcccgcccgagccccaggcagcatgttcctcctgtgccctgggtgcattaggcgagatcaggcacgttcagggtgatatgacgatagacagtgctccaggagcattaggaaaggttctgctgatcaggcttctgtaacaggcggggcatctgctaaggtggcgggaaaggtttggatttcactgcacctgggctggtcctcgccctgagtcgtagccttgcattccctgccaagccacgcccagaagcatcctgggagggacaccagtcgggtgttgactctacttgggctgttgcccagaccagtcggatcaggactaggaggcagatttccgtgattttgcctttggagtgagagaggaggctggggtgttaaccccgtggtctcctcgtggtcccatcaagtgactctgtgaaagccaggagtccctcccacccaccccaggccccgaaggcttctccactatagcaacggggtccaaagctcggggtgctgggtgtcaggccgtcagtaacaggaggaccgacctgctggggcggaatgtctgtgggttttagggtcctccggaatgcactcttgctcgcggagggagatgagcagatgtgatgagtttccatcgacagagctggtgacagaaattacagagagcaggtggaatctcccgctttttgttttctaacccggaggaaatctgatgaaatcaacatgatactccagaaattatcatcaaacatggagaatgagtcattctaaacagggcacacagggaattggcaggggaggagcaagggcagcatttatgcctcgatcccctccaggccagctgctttccttctgcagcgttcaggttcgtggccgcaggagaacggaggagaacgtgaacagtctgtgcgctcagcctgaggtttccctaagaccttctccgccccagacatgctctcgttaggttggtttttctggattggtttgttctctaattgttccttggggtagatcattggcagaggccacagggagaatattctgtgatctggagtctatgcgtggcgtgacagcagccgtagcggagggggtgtgtgcggcttcttgagtttgccgccggaatctgtcagtgattccttctgtatgcagtgatgttgtctgttcagacgctgccctcttggttcctggggaggagccaagagcagcctcttttgtctctggatgaatcagcctttgcacagaaaaaggaaaaacttatcagttatgagctcaaatgcgccttcctgtcttcctagacctgaccccggctgggaggtgaagaggtgagatggagcctgctcttctagggggtcttgagatccagtggtggctgtcctgcccagggtgggccctgcaactgcaggctgtcctggagaagtgaccactgggacctgctgagtagacggtggtcaagcttgttgggctgtccaggtaaacccgaggtgcccaccaagggaacctgttggtgttttgagaatgtgtggcttaggtttcaggaacagagtagaattcctaaattcagtctcctgagtataatcctatcacatcagccatttggctcccttaaagattatcccagagatacctaccgagttacctctgaaacagtcatctttgttgaaaccgaattcgttcattcattcgggtttgagagccaaccatgcacatgacaggagcagaaaaagacaaacagatggtcttatgtcctgggaatgctcagattctcatggagaaattgggccagggacaagtctgtgcatggtgtgtctagcggtggtaaagggcagagaaagaggatggggtgagggccggttgtgttgacatttgagcaaagacctgaatgaagtgaggggatgagagcatctcgtgtctaggctggggccttctgggctgagagcactgcatgtgcaaaggccccgtggtgggaggggcttggtacctggggaacttcatggagaccagaagagtcaagtggaggaaggcagagaacagcaggaaatgggacaggggctgatgatgttgggcttctagggcactggaagctgctgatgagagcccaggagcctttggagggtttcaaacagagtctggagggtgtctgactgacttttcaaaatgttccggctgctaattgaggggtggactccaggccgcaggcaggcctgctggagaggagctgatgactgtaattgcatcgagagatgacggtggtgtggatgtgctggggagaggtcagccagaggttgtgttctgcaggtggagccaccaggagtgcatgagagagggacggggcagggaagacggagagggatgctgggcttcttggatggctggatggagctgccgtgcatggctgagatgggtgaggccaggggcaggggtttggggcaagctccagagttggctttggatccaggaaattcaagatgcaccttaggtactgaagggagcgcttggtgggcaggtgggtgtctgagtctgaggttcaggaaccacttgttaaaagaatgggaatgcagccatgtccacctgtgctttgagggggctcaggctgcctgggcatttgagttggtggctccttagcagttttcctagccaaggggagatagccacacccacaaacacaccattctctctcatggcacgtgcctgggaaggtagctaatgtatgtttcctaatattttctaatcttaaaaatgttttattgtgcacattttcatacaagtacataattttaggaaagatagcataatgaaccttcgggagctcattataaagtcaatcacagcattgtgccttttactccttttctaataaagcaaggaccagttcacgggtgcggcactcgggatgggcgagtcggatctgaggctctgggccgtgggctctgggctacctgtgctccacagtccatgcactgatgggtcactctaggacctcacagggctgggaatcagcggagctaagagatgaggagagagaagatgggcttcctggaagcttgggtgaggttgaaggaacaatgcagaggtggacggtgttgggccagctggagacacagcaagttccagcgaatgtggccagtgattgattgaagggttgagatcggcaatatgtaaccctggaggtacaggtggagactgagtagtgggggtcttttcatctcaggccaggggagagcagactgatttttttaaaagcggtgagcactgtccagaagtgttgtagcagggcagcagcatggctttgagaaaatcaagggctcaccagaggtggatggtgaggagcttgaggagctccaggggcccagcagccactggcagcgaaggcctgagcaactctgggcgtgggaagaaatagttagcaagactgggagcagagagtgttttgtcaggctcacatcttggctgcgttaccctgggcaagttgctttagtgatctctccaagcccgttttcatggaatctgtaaagtgcagccaagtctggtacctgctgcctagggcccttgaggacgcagtgggatggtgcctggtggagctatgagcgcagcctgtgctgtaaggggaggacacataaccgtcagcgtccacgtctgttgttagatgccgttagaatccatcgggggaagtgggtgatccaggggagattgagaggttatcacccagaggtggccagtgagcgtggccacaccaggctgagctgggaggaggaggaggggtgggaggggagaggattctgctgtaggaaagaggacagagctgacatcccagtgaggagcacacagggcagccctgggatgctggctgcattctccatcccgtgccagccccctgtagatgcagtggtgtctggaggagcagagcttccctttcagccctcggtgtgactccacctgctcaggaaggttttgggagtggagagccctctgcactcagtccacaccagggctggctgccctctttctgtactgtaaaaacggccccaagggtgcggacagggggcacctctgttactcacccctgaatgtctggatgggtgttacagctacactcaaggatggcctccctctggccctggggaggaagctgtcagtctggggatttacagagcattgaggaccacaggacacacgtctcccacctgctatgtggaggggagggctgcctgtgagtgagctcagtggtgcccgtgggaacatgatggcttctgggccctgggagtgggacttccctgcttggcttctctcggcctgaaaaggggagagggtggcagagtccacagttgttgactcgtcttccttgaatggtttcctctatggggagaggactgcagatctctttctagaactgcaaacactttagctttttgtctcatcactggttcaggggagtggccataccccatcatcaataataaacacacacactggtgcatctccagaaagcacgtgtgcagttctgtgacttctttcttctgctcccagggcgctggaggccatatgtcagtagttttcaaagaaaacgacattgctgcttccatcttgcccttttctacagccagagttctcctcctcaatcggaaagctgcagtggcttcccagggtctcctggacaagactgacccttcaccaccgcgttccgccagcttacctggcctcccgcctttgctgtgggctccaccacagcccctccatccctctagcccctccacacttgcagggccaggtcttcactgtgcccacctgttcttaggccttccacaggcctctgggcctcctccttctcactgaacactcactggcatctcaccctctatgggcagctctctgggccccactaggtggccagtcgtgctctccaggtaacagttcctgttaccgccctaggccccaccagggctggcgatgccctgagcagcctgcgtggagccccagatgcctgatgcccatctctgctgacagctttgcagagccaggacatgcctggaagcttttgggaatgcctccctcttgtgcccagatggactttttgttaaccctccatgaaataattcctcctggcatgaatgtgaaaccaggcaatgctatagtcatgaggcggcgcggtggccgaggtggccgaggcaaccctttcccttctgcaggagagttgtgggcccagtgggaagagcacacattggtgattaacaggagtcttcgtttggccactgtgacccagagcctcacccggcgcagtcctcggagtagctctggactggtgggggtgggagcaccccagtccctgacaggatgggcaggtgggctccagttgccctcacagctgacaccccctgatttttcctcctcctcgggtgcagtcagatggagactctcaggcaggaactgtcaccgtcacacgtgaaaggccacatggcaagtaccagttgtgggctggagattgtcctgaagctcctcccctcacccactcatgggtctcttcattttctttctgcatcgattctcttcagtaaatgatcccgcatttttgtatgggaaggatttttactcctcactcagcctattgaagtcaggctgctctggaggtggccatcactggggtctccacagtggcctccaagcagcccgggggcttgcacacgtggcccttgcatttcggggctgccgggctgcctggctgtggtagggtggtctctcacgtggcggcaagaccccttcatccagctctacacgcaggctgtgcattcagagctacttggtcactgcttctggtagggggcgagggtgctgtgccgtcagcgctgagcctcagcgtgccagaccccagcagaggggtggagtgtggggtggaaggaggcctcctcctggcatgagcaccgtcactgccagccagggagtctcggtccagggcgtccggggttctccccaaggcgtagttctcaggggccgggaatagggaataagcacacagacctgaccgtcgtaacttcatggggaaagatggaaacatctgtgaccacccagtttggggagaacagcttcattccttcctgtgaataactggcctgggtgagtgctggcctccactctgcccctccttacactgctgggtaggagagacggcggggctgggctcaggtaggtgttttttaagggaagggcccccagcagggcagctctgccgctccccagagaggtggccaccatgccctcctctcctgccgcctgctgcattcaagcaccacagccccggtggcccagcaagggaggctcatctctcacggttccagaggccggaagtcaaaagtcaaggctctggccaactctgttcctaggagggccctcttcctggcttcatgtgtcctcacgtggtagagggagagagaacggaagctctctggtgtctcaaataaaggcgctgatctgatcatgaggaccccaccttcatgatctcttctaactctaactactccccactgccccacctgccagtgccatcacattaggggacagaccttcaacataggagtttcgggaaacacagttcagtccgtaacacatgccttctctccagacagcgttcaggtgcagaatgcagccttctgaggccttgagatggaaaggacgcctcccttgagccactatccgccggtcactgggagctgggattgcagcttctgatgcagtggtgacagtggctgagacttggcagggttaaatattgaacacaagatggtccctatagcagcatgtggacacacgccttgctctgctcactgcacaggggctctccaagccatgctcactgcacatggagcctgggggaagagtggggatggtcagggctcccacccggctgctgcagaaacgttgcaaagggtggtgtcagggcctccgggtctctgcatggtaaaggcagcacactgggtcagaagctacattctcagctgtccctggatagaggaattgaggaaaaagggacctcagaccattgtatatgtgcccagttatataggggtgagatttgcctgctcagagctctaagtactgtggccagctgtgaaagtgtctgccagtttctcttggagagcacatgaaattcactgctttgaaatcggctcgctgctgttcctgtcccttctccctggaccctgctgaagggcctgctcagagccagtcacctcattcatatccagaaccccccacatgcttcagtcctgtctgtgcgcccttccagaaaaaaaaagcagaggccttaggggtgattcttgtggtctcttccacggaaagatctttcctgcttagtaacagtggttcagtaaatatgccctggtttcatctgcatacgttgcattgagaataccttatggccgctctgtgttgtgtttagaattgtttatttggggtgcagggggatttcaggagcggattgggtagggagcatcacccttggggcctctgctgggctgtgttcattgatggctgcttcccggggccgagtcaccatgatgactgcccctgcgctgggatcagccactctgaacaagcagaggccgatttttccttttccgagccctgcagctagcagcatgaactgtacagtcctgcgctgtcctcctctttgactgtaatgaatggactggccaggtgctggagcacatttcgcaaacacccttacgcccctaagaagagcaggtgcaaacagccggccagaaaacactgcttgggctgtgtgtgcccagtgtgccaatgagacaagcacaaagtgggcacagaggccaaggagcaagcgctgctctgctctgttgggccaggaaagatgaaatgggtctgtcctcattagaacagcctggaagaaagaggattcccacttcccataaaattaccattgaacccatgtttcgcttgcttaagggacttttttgttcctcctctactttcaggaagaaacatattgccgagtggatgccgccgcgcagcgtgtttgcttgaggcagaagcttcagcatctgctgggataactggaggaagaaatatgaagccttagcggctttacccgggaagcgagtttcgagatggcggctcagcggatccgagcggccaactccaatggcctccctcgctgcaagtcagaggggaccctgattgacctgagcgaagggttttcagagacgagctttaatgacatcaaaggtgagcttctggggaacaggactgtggctaagggagaacgttgggattttcaagttgggatccaagaacttttctgctttaaagattgccagtttagcattcagatagttaaagtttagttctttaaacttcatcatggtaatagatttagccctggaatcatagtcacttgtcttattttttggttcccccttattagtgaaaccccttcttaatacagggtatgtttctttttacttgataaaattcggtgacagtgtggtagggagcttggtggtacagaaacccaggggaacagagagtgtggcaagtagatgaaatattgagaaccactagagaagaaaaaaggtagcttcggggagaggtcagcaaaccttttctccaaacagtctgatgggaaatatttgaagctttgcaggccgtataccatctctgtcacaactattcattgctgcctcgttgcatgaaagcatccatgaagttaagtcattaaatagccagagtcgtgtttccaagacaactttttttttgcagacagccccatttggccccagggccgtgctttaccaacccctgatctagaaggtggttctaaagtttaataaccctgggtctctgggtttctccagtggcctcgtaaaattgagttcatgagaaaacctatcttttggacaccaaggtgaatactagcaggtcattttcttcctgcacatctgccctaacctaggccacgttcagtctctctcacatgctcctttggggcttggcagttgcggtgacagcaccatcatcatcaatatcatcatcccttggctttctcttagctgttgaaactgtcttgcctggagcacagctgaaaagtaggaacttgactttgaccatttgtatcctcggccccagcctaaagtcagtgctaagtaaatgtttcttgaactaaactgctatcccccagataaagttgtaatcctctaccctgatgtacaaaaattatatgcactgtgtttatgtctgtctaattgagtagcttctccttcccctttatcccaaacatcttctccctgcctctgattgatgctggcatccctgggcattgctgtaaatgttctttaaaagaaacgtctagcccgtgtgagattttatttgtaagagagcaacagtgattgggtgttgccataaataactgaagcatttatttttcagattctgttaatggacattttgttttttactttatagcccaactcatcagagtcaaagctggaacttgtgagcataaattgtgtgatttgggcagagtgttaaagtgaggagggcagagtcttaaagtgaggtgaatttttaaaaatgtcagtgggctgggcgcggtggctcacgcctgtaatcccagcactttaggaggccgaggcaggcggatcacgaggtcaggagttcgagaccagcctggccaacatggtgaaaccccgtctctactaaaaatacaaaaaattagccaggcatggtggagcgtgcctgtaatcccagctactcaggaggctgaggcaggagaatcacttgaacccaggaggcagaggttgcagtgagccgagatcacaccactgcactctgagactctatataaaaaataataataataataatgacagtgctctggaggaaatattggctgttatccctaaaagaatccctaatttagaggaggaagacaaacaagacagccttgaacgtgaggaggaggacagcctcaaacatgaaggggagggtgttttgagaatctgaggtggacagaaccatgggatctctggccttgcccagagattctggggaatctacctccgaggcgccacatgtgacccaggcagtttgctagccagaagcttcacgcacatcccagtgatagacagacttcaaggtgggaatttatttcagccaaagtatctgccatgaaaccttctactctgatgaatgttttgcctgcagaagaacgtaggcagacggataggaaatgtattattcagtacattgaacttcctaacacccagggagatttttgtattaaaatcaaggtggctgtgaatctgggtaacactcctcagaattcattaagatagaattcgttagggattctctggcatttgatgggatggaagcccttccccagtgtccccagctgcttggtggcagttgactgatggagggcctcatctagaagggggaatcacacaacagtccacctccctagggttctggaaaggaagagtggggtgatttcccttggctaagcctgatcccttgagtgagatctgtgaccatttctcttccaaggagagtgctgggaattttaagtaaaaccattcttattcttcagttggataaaactgaatgataattctcattgatacattctaggctatgcacaaagcattcttgattgctttggtttcttaattttgaaactactgtaagggaattattctgagggagcataataaggacataacctttgagggattctagcaagattttgatggccggcaagctctatttaattttcatttagttttcatctttatgtgacatttccagtagattgtgtcaaggagataaaatggtttatattcctggagatcatgactagcaaaacagaaatgagagagaagagcttctgtatcctctggcctcagcctgacccacatcaattcttcccacctctccatgaaagccattttctttcacaggttttggttcactcccatctcatattaaataatttgttggttttatgatttttttagagcacaagggcacagccagggggaattcagacactgctttcaccaacaccaggatccaatagcatagattatggcttctctgtgtcgtttacgcatgcacgatgatcattcattccacaaatactcattgagtccccgctacgcgccaggccttgtacgaggcccagggatacaacagcaaacaaaacaggctctaatggtgctgataccctaatggggagatggaggctcctcctgcaaaagaaacacacatacacacacacatacacatatttcatatatatatacacatatatataatatatatataaaggatatatgtattttatatatatattatatataatatatattatatataatatatattatatataatatatatattatatatatatattatatattatatatatattatatatagtatatatattttatatatatatatataatatatatacatatatatatatatatatatatatatatatatatatatatgaggtatgtagagaaggaaaaattcttagttcttggcttgggcccctataacaaaagacattaataagagaaaagcatgcaaacttacttaatatatgttatatgtatattacagatatataatttcttcataaggaaatgaagacttaaagaagtaattaaacctgagggatttgatgaggtgtggagagtcctggaaaaatgagatgggacaagaaaaagcataagcaagtgtcatgagctggaggacagcaaggcctgggcattgcagattccctgtgtccttggagataggatgctctgtcccccacatatagggagggcccctcccacttgagggtctatgacctgcttcagggggcaggcagggagtcctgcctgcacctgcggtttctcaaattcctccagcttaaaatatgtgtggtgctatattttggggtagcatgttctgaacctcatcaggtacatgatgtagtggttggtggtaagagctatggaaaaagataacattggggccaggagatgtctatttcacataacatcctgtgtgtcctcaagttgggtcaagcaatattatgacaagtgccttatctacgtctttgcattttgtcctctccaaagctcattgaggaaatacactttttgtccaccatgagtggagtcttaggctctggagatcacacagtttctaagggctccactcgagtctgggtttagtgatcccagagccgggttctctgagacacccagatagacgggcctgctgtaatttcacaggaggaggtaggtggggcttcaaggcccagggatgctcccagctaagcgcatctctgtaacccagttaatgtaaatgaatagaaactgtctacctgatttcctaacactttcccaaggaagtgtgattatttcctttcaaaggaaaaggaaactggcaggtgattttctggggtcgggggggcaatttgatagaatacgatgactgtggacttcatcacattagaaaagatgtaggtttagtttaactaaaaacggattcctttctttggtcatttgctttggcaacttaaaaaaaaaaaagaaagaaagaaagaaagaaacgtttcctttctttctttcaattgtttattacgggaagccagaatgtcagcagactccgtaagtgaggcagtttgggaggtgggggaggggagtcctggggagaagtatatgtgcttattttcttcagaaagagtgttcttcatcttctgaatatatcttctcatttaatcatatccattatttttcaaaacacaccacttgtttggctgacttatttttgctgtttcatttgccgtctacattggtaacatacagagttcaatggcaggagccatgaattaacttgattcactttttgaagggttggaatttttcagactgcttcaacacttgttcaatgatagtatgagctatgactaggcataatctctcattttcaaggtatgtagacagtctgttttcatgttgtgattttgaatgataatttaaaagaggttgggccaggcgcagtggctcacaccagtaatcccatcattttgggaggctgaggcgggaggatcacttgaggtcaggagtttgagaccagcctggtcaacatgatgaaaccccatttctactaaaaatacaaaaattagccaggcatggtggcacacacctgtaatctcagctactttggaggctgaggcaggagaatcacttgaatctgagcggctgaggttgcagtgagctgagatcatgtcaatacatgccagcctgggtggcggagtgagacactgtctcataaataaataaataaataagtaaaataagaataaaagaggttggaaggaactgacttcagaattcttactttatctgaggaaacagtttggtgaggaacaggttgagtttggaaatttaagaagcaggttgagggaagctttccatccagaggcagagcttggaatcagctcatacatgtcattgcgggagtttttggaatctgttcatttccagtccctgatcacatgcagtggtcacctaactcaccgtgtcaccgtgttttctaagttaatcacattcagtttctctttgtatctagtagcagttcttttaagaagaattttaacgttgcccaaaatgagatgtttagggcgtagggcatgttaaatattccattgcactgatttgcctttctgtgagtgatggagaggctcctctgtggtctttctgccggacataggctgtcgattttgaaggtgaccaagtagcaggaaccagttcgttggccaggtaaattacctactgaatttcactttggtttgtttctgttggtgacttgcctgggttattgtgcacctgtctgtttaccaccgtcctctctcctttgggaagctctccggacaccccgccggccttgccctcaccatctgttttctttgtgttttgcacagtgccttctcccagtgccttgctcgtagacaaccccacacctttcggaaatgcaaaggaagtgattgcgatcaaggactattgccccaccaacttcaccacactgaagttctccaagggcgaccatctctacgtcttggacacatctggcggtgagtggtggtacgcacacaacaccaccgaaatgggctacatcccctcctcctatgtgcagcccttgaactaccggaactcaacactgagtgacagcggtatgattgataatcttccagacagcccagacgaggtagccaaggagctggagctgctcgggggatggacagatgacaaaaaagtaccaggcagaatgtacagtaataaccctttctggaatggggtccagaccaatccatttctgaatgggaacgtgcccgtcatgcccagcctggatgagctgaatcccaaaagtactgtggatttgctcctttttgacgcaggtacatcctccttcaccgaatccagctcagccaccacgaatagcactggcaacatcttcgatgagcttccagtcacaaacggactccacgcagagccgccggtcaggcgggacaaccccttcttcagaagcaagcgctcctacagtctctcggaactctccgtcctccaagccaagtccgatgctcccacatcgtcgagtttcttcaccggcttgaaatcacctgcccccgagcaatttcagagccgggaggattttcgaactgcctggctaaaccacaggaagctggcccggtcttgccacgacctggacttgcttggccaaagccctggttggggccagacccaagccgtggagacaaacatcgtgtgcaagctggatagctccgggggtgctgtccagcttcctgacaccagcatcagcatccacgtgcccgagggccacgtcgcccctggggagacccagcagatctccatgaaagccctgctggaccccccgctggagctcaacagtgacaggtcctgcagcatcagccctgtgctggaggtcaagctgagcaacctggaggtgaaaacctctatcatcttggagatgaaagtgtcagccgagataaaaaatgacctttttagcaaaagcacagtgggcctccagtgcctgaggagcgactcgaaggaagggccatatgtctccgtcccgctcaactgcagctgtggggacacggtccaggcacagctgcacaacctggagccctgtatgtacgtggctgtcgtggcccatggcccaagcatcctctacccttccaccgtgtgggacttcatcaataaaaaagtcacagtgggtctctacggccctaaacacatccacccatccttcaagacggtagtgaccatttttgggcatgactgtgccccaaagacgctcctggtcagcgaggtcacacgccaggcacccaaccctgccccggtggccctgcagctgtgggggaagcaccagttcgttttgtccaggccccaggatctcaaggtctgtatgttttccaatatgacgaattacgaggtcaaagccagcgagcaggccaaagtggtgcgaggattccagctgaagctgggcaaggtgagccgcctgatcttccccatcacctcccagaaccccaacgagctctctgacttcacgctgcgggttcaggtgaaggacgaccaggaggccatcctcacccagttttgtgtccagactcctcagccaccccctaaaagtgccatcaagccttccgggcaaaggaggtttctcaagaagaacgaagtcgggaaaatcatcctgtccccgtttgccaccactacaaagtacccgactttccaggaccgcccggtgtccagcctcaagtttggtaagttgctcaagactgtggtgcggcagaacaagaaccactacctgctggagtacaagaagggcgacgggatcgccctgctcagcgaggagcgggtcaggctccggggccagctgtggaccaaggagtggtacatcggctactaccagggcagggtgggcctcgtgcacaccaagaacgtgctggtggtcggcagggcccggcccagcctgtgctcgggccccgagctgagcacctcggtgctgctggagcagatcctgcggccctgcaaattcctcacgtacatctatgcctccgtgaggaccctgctcatggagaacatcagcagctggcgctccttcgctgacgccctgggctacgtgaacctgccgctcacctttttctgccgggcagagctggatagtgagcccgagcgggtggcgtccgtcctagaaaagctgaaggaggactgtaacaacactgagaacaaagaacggaagtccttccagaaggagcttgtgatggtgagtgctcagcaggtgcctgggcgttcaggggtgctgctcagcaaagcctttccgccttcccagtgcacatgggcgtgggccgtggtgtcgtaagtcaccaggacagtgtctgtggctgatgtcccgctgcctgagataggtgcggctcagcacagcctttcgccttcccaatatgcgtgggcgtgggccgtggtgttgtaagtcaccaggacagtgtctgtggctgatgtcccgctgcctgagataggtgcggctcagcacagcctttcgccttcccaatatgcgtgggcgtgggccgtggtgttgtaagtcaccaggacagtgtctgtggctgatgtcccgctgcctgagataggtgcggctcagcacagcctttcgccttcccaatatgcgtgggcgtgggccgtggtgttgtaagtcaccaggacagtgtctgtggctgatgtcccgctgcctgagataggtgcggctcagcacagcctttcgccttcccaatatgcgtgggcgtgggccgtggtgttgtaagtcaccaggacagtgtctgtggctgatgtcccgctgcctgggatatacgtgtggggcttgaagtgtgcttgaagtggagatggggtttacgggggatcctggggggccccagacaacccaaggaccctgcaaagaagagcattccagttacttttcccaccgaatctgtgagctccaagagggtcccagaatggaccagatgcgggtgggggcagaaggcggcctgtgctctcgccattcagtttagatctcttgggagcagatgtggttcgttagattcccaacagggtctctgactccagagtcccacgaaccgctgccccaaagcctgtgttcattgtaatgtgagtttttcttgcctttgcttccttgaagcttctaacatctctgtattgtttccacttccccctctgtgttggtttgagttggggcgaggacagcatttgttttgccagcacaaccgtgaactggaatccaaagaaataaaagggggaagtaagcatcagactgtgggttacgccctggcccacgagccaaccggggagcatttgctcaacgctttcttagcactgctccccgcaggcagccccaccgtcagcagagctgggtcctggcggttaccttggctaggcttagccatatccgtgtcctggcatccccaggggtgtttgtggtggagagtccctgtggacttctccctgtgatagaacggagtccacccctatcctccggagaggggcgcattgctggtgttcattcctgtgggaaaaccctgtgaccttggcgtgtgccgctcttcctcgttcctctgagcccgcaggctttcttgcatcctagcttctgagaggcgtgcttcttggtgcccggcctttctgccacctccccggctcccctggattgagccctgtttgtctgggagagcccagagtgtcctgtagacacaggtgtgcaggcaagggtcacatgtggcacatacccggctcggctgcccatgttgagccaggagacagaagggacgcagcccggcaggagtggggcaggagtcgggtgagaccctctctgggtggcctgcagtcgtgtgcagtgccagaagcatggagccacgagattgcccaggggagggagatggaactggaagcggccgtcaggggggccaccttggcaaccaggaaatcactgcacttgggtggggaggaagcgaacaaacgcagcagggaagcctccgggcccccatgtggggtcacctgcagggaggggatggcctgcgtccctcccatcagccatcacccatgtgtgattcagagcacacctcctggctctccagaacctggtgccgggccgtggcctggtctcctcacgggtgcacccagcacagtggcagacaaagcgcctccatcccgtgagagcctctgtgcgggcggccccgagaccacagccgtggctgtgcatgctgtcgtggaacctgacagcattgctgagcccaggacactcacctcgacgttgcaccagaggtggaaaaatgacacaaccaggagtaccacaccagctgtggaaaataaccgccgagtaggtggcttttacactcattttcctgcttttttatctttttccaaaagacataaatgatcaaactctctcaattcgattggtgagcatctctgggaggggattttttggtgggcctccctgtccgctccagggaggggtgtgtcctctgtgcccgagtccttccgctacccagaaaggaggaagtgaaacttgcccttggccaggtcggctccctgaggcaaggttagattttgtggtgataaagtgaaactggttttgcagtgtccccacccgccccccacacctgtgtcagtcatcatcttggccaaacttatagaaaccacagacggatttctcccaggtcgtttattaggagaccctgaaaactggctgttctattccgcttgtcatcacagggctgccacgatttctgcggcctctgccaccgctttacctgcccctcccagagagtcacagccaggccaccccctgcctctcatttttagcatagctttcggtgtccttgttctgatgccttgggttggaaacagtgtttaaatgatggggaaaatgtgagagtttgagacagtcagtgtgcagggagatgggaaggaaaaaggagtcaaatgagacctgggttgttcctctctccactgcctttagaacggggtcagcctttgcccctgccccacaaagtcgtgtaagatctggccctacccatcccaaccctgggggccactgtgctctgtgcacccctgccctgaacacacccagctcgcccggcctccagctcctgcagatgctatgctgttcctcttcctggagctccctttcccagacctcctcatctccctcagctgccagctcaaatgccgtctctccaggacgtccttctctgcagccccgcgcactccatcatcctctgtctccatggtgtttcttgaatcagaagcggtttgttttggccaggcatggaggttcacacctgtaataccagcactttgggaggctgagacaggagaatcgcttgagcccgggaattcaagaccagcctgagcaacatagtgaggcttcatctctccaattttttttttttaaatcagccaggtgtgttggtgtgcacctgtagtcccagctacttgggaggctgaggtgggaggatcacttgagcccaggaggtcgaggctacactgagctatgatcgcagcactgcactccagcctggacaacagagtgaaaccctgtcttgaaaataaaggaagagaagaaaagaaacaagtttgtttatgttcttgtgcacttgtttctcattattactctaactgaacataggtcccatgagaggaagggccccggcacataagaatcactgaggtactagatggataagtgattgaatgaatgaatgatggatgaatgaatgaatgatgaatgaatgaatgaatgaatgcaggccttgggctgggctaagaatccaagcgggaggcattctcacgtggccataccatgcttctgttctgtggttccatttcctctttccattctttttgtgcctgtttttgatagagtccgtgtgtgaggcatccccgtacctctgcctgccccttcccagcagcatggctgtggctgcactcagagcacccctctgtcctggccacttctctcccaccagagcctctgtccgtgatggtgtcagctgaagaatgacaaggtttgttcatttggaaaggagagcctcattcctcataaagggttgcagcctgtgggtggctattctgacaggttgggaagcagagcctcctgccagaagccaaaaacagacacttcaagggaggggcaaaggcaacaagaatttatggatattggtggccaaatatacatattcaataagccgtagggggagtcatgagtatttatgaaaggagaaatgtgcacattcacatttaagccttgtgctccttcaggggtcccatgtacaaaaaatggtggcagtggcatgattcaagggtagggttttctttcagccccctgatgcgtcagaggcgaagcaggggacatgaaaccctcgctgtgcatcctctgtagactggccagaaacactgcgtggtcggtgggctcccgtcaggcaaagaggaggggcagcgtctggcagtggtagaggcctttgaaagggaacccagctttttaagaatcagaaaagtcattcagcagcgcccttttgatgcaagagactattcccaattctcgggatactgtcagcactcggcacatggtctctgttatggtggggaaggaaggggagtcagctggagatagccgtgggcagtggccatcagccatgggagcagaagcagcccacggtggcctcaggcccagggagaacttcctaaggggccagagtgagctgtcacaactggtcctggatccaccataagaacgaagccgtggggtgtggtgacctggagccgtcggtgatggctgtagcaggggcgttttggtcaagttgcgggaggtagggaaataggcgtgtcgggctctgtagagaagtttctatgagaaagggaaggagttgctgtgggatgcaaagcaagggagggtggttgttttgggagtggagtgggggccggaataaacccaaagagacttgaaaactaacagaaataaggaagctagcaagtgcatggggcgcattggggcgggaaagactggtgtggtgtgaagggactctctgtggattgggagaagacccactttaacctccagaagaggaggagttgatggacagtgtgcattggatggggtcctgagggattcctcccaggcagccccaaagccagagcctgtggctgttaatgtgggagagggaaggaggatgggcccattgtccagatgccatgtgcagaaggcttcccctcgagttttggggcatgttgggaaggaagcaggatggaataaacatgcagcaaaaaagcctaaattgtatttctttgtactttataagagtattttcccccgccccttttttgagaaaaggtctcgctctgtctcctaggcgggagtgcagtggtgtgatcacagctcactgcagcctcgaactcctgggctcaagcagtcctcccacctcagcctcccaagtagctgggactacaagcaggtgccaccacacccagctaatttttttttttttttgtctgtagtagagacaaggtttgattgtgttgcccaggccggtgtggaactcattgagctcaagctatcctcccacctcagcctaccaaaatgctggtattataggggtgagccaccatggctggacaagaatatctcttgaagcaagttcccagactctggccgccaggcccgctattcctgtcaatggcgttttgttggaactcagccacacccattcccatctgcatcgtctgtggctttcaggcttcgtgtgtcccacaaaggcaaaagtactatctgtccctttataaagttcagtcaccctgactgaaatcatggtgtactcactgtaacaaaattccagttgaaaccagggtagtgcagcagtccatcgagtgtttcctggtgtacctgtgtgcccataaaaagaggaagctgcaaggatcaagttcatagagctagagcctcctgctgtgaaatttttctattgctaagaattggttggcacccaaaatttgtcctttaaaaatatgcatcagttatgccttgttgatggtgtgggtggtttgtaacaaactaaaccagggctgggctcagtaaaagttgtgtaagtgagtgagggagagatgccttcattcttggtgttggaagtgccgacctctcctttcatctgggatccatggaaatgggaccttggctgcccctggatggagtccaggcgctctccttcccaggggccagagaacacctgtgtttcccaggaccttggggacctgtgcccagttcccctggggagagagcggttttgatcactcgcaccaggaatgactcgagtcagaagcaggtgactttgacctgttctgttacctagaaaatgaggccactttggagccaggcagctgtgcacacagccagattagcttggtgtgtgctgagtagccacgaaagagctgagttggggacattgagtgacttcgtgtcaaaccctgtggtggtccagcacaccttcccaggaccacagacgaggctgccaccacagcaagaaaattaggatctgacagcctaccagctaactacacaccctcctgacacgtgaatacacacgtgtatgcttttatcttctgaaacaaatctagtcaacatttaattttttaaaacaatttgttttgaatatatccaaattcaaatagaaacagaccttcttctgaaatatataaatagttgatatgaagcataatccagaccggtattacatttggttcaattcccaattccatgtggggctcatggaattgggaaggccgctggccgagtgctgagaagtttgcatatttgcctccacgcctgtcacttccagctgtgggacccgggacaagcctggggtctgcaggcttcctgtgcttatctgtagaacagatgccttgcggcccacacagcagggaggacctggggttgggtgcccagaggcagctctggctctggcatttctcggtgtgaaacccacttcccctctctcagcttcttctgtaaagtgggttgaactcagcctctgcttcatggggggctctggggagcggaggagctgagtgtctggctcacagcaagccctgggtttctttttttttcttttcttttttttgagacggagtctcgctctgtcccctaggctggagtgcagtggcgcgatctcagctcactacaagctccgcctcccgggttcacgccattctcctgcctcagcctcctgagtagctgggactacaggtgcccgccaccacacccggctaattttttttgtacttttagtagagacagggtttcactgtgttagccaggatggtctcgatctcctgacctcgtgatccacctgcctcagcctcccaaagtgctgggattacaggcgtgagccaccgctcctggcctagccctgggtttctagtagcttctacaaaaacaaacggccaccaggtcctcaaacccccttctggccagcctcgttggtagccagctgtcagcctctcatatctagggaggcatcagaatgatctgtcgctcctggttctttttaaattccatggattgagatgctgggggcccacctagaaggatcgtgagtcacctactctggctaatgcatgccacaagtcgccaaaaaggtcacctttttgtattgttagactccccccaggtaaacataaagtgtacattagaatgctcagtctaaaacagctgggctcgctttgaagtaagcagcccagccgaccgcatgagcactagcaagacgaccctgctatcggcacaaaatagttggccaaagagcgccggtaccagcggtgtggttggcgggggtggggggttgtttgttttttagcacactttggagtcctaaaatgacaacctcaggtgctgaaacagagcgtagagagaaagaacgccaggactggtgactttcctcttctcttagcaactcgcctgtccaggggctcacgggagcctcagaaaccgtctctgggctgcctcaggccactgtgccctggaagccaagcctttcccattgttggatgagagaaagctttaagggtgggggtgagctgtgccttctatggcagaggagactcagacaagaatcagacccagcatgcggctctcctgccttcctggtgacgtcatcctgactggctcagagccacacgctaaccatgtgtggcctcatttataattaggatggcgccagagtcgcttgcatgacacccagtggcagtcatgtgacttggcacagtgtacaggactagcaggcctgctgtcttgtgctagccaatttgatttgtttctttaaaccagaagtgtgagtttgaccccagcctggggtcccccagatatattagccatatgttcaatgcctgtcccatccagcccccgtttttaggagggaattgagtcccaaggcggccacgtggttgttccagcctcagctgggacttcactgtcccagcagggctgtctgtcctattacctcccctctgacttcctctgtggttagtaatccctgtcctaaagacacagtagaaagttcttgcagctttgacgtgggagcagtcccaccaattgtggaaaccgttttctcatgttgcacagtcctgggggaggtctgtgcatctcctggtcaccgtggttcttggtggtacaccctgtctctgaccagggcctcttctgttctctgtcttcttctccctgggtggtccctgcctgagtcccccagccttctacccgcggtgctctctaactggccaatgtcagcaccgcacactcagcaggtccagctcgccctccatccgtctcggcctcaggctatggtgtctatttggtgaaatgcattcgtttctctctggtgtccccagagagtgggagtggtgacaactctaatccatattcaccctgtctgttagcttcctggggctgccaagacaaatgaccacaaaccaagggacatcaaacaacagacacctgtcctgtcaccattcaggaggccacaggtctcagtcaggggtcccagggtggcctccgtctggaagcagtgggggagaaggggttgcaggcctgcctctcctaagccccactggctcaaccctccttcttttccttggcttgttgccgcatctgtcccgtctctgcctccgtcttcacacggccttcttctctctgcctctctgtctgctttctcttcttatgaagacgccagtccttggtgacttcctctaatccagagggacctcatcttaattctatctgcaaagaccccattttcaagtaaggtcacgttctgaggttctgggtggatgtgggctttggagggagacactggtgaacctggcacgctctgcacatcatctcttttctcccgtgaatcctggcagtgatcgatttcaggggacatttggtagtaggccagggaacatggagaatagagagcccatggccattcctgcgccgtctgctggaattctgcggggagcagagcctgccccactccctacactgtctcacgctgtgtgcctcttcctctgcaggccctactgaagatggactgccagggcctggtggtcagactcatccaggactttgtgctcctgaccacggctgtagaggtggcccagcgctggcgggagctggctgagaagctggccaaggtctccaagcagcagatggacgcctacgagtctccccaccgggacaggaacggggttgtggacagcgaggtgagcagcggctgagcttcgagctcaccgagcccctctgtccctgggttccgtggacccatgcagtgcagccataaaaagtcttgcctcgcggcatttctgtgagggtgcaacaggtggaaatgtgcacgcatgtgcccagcactgggtgtgcctcactgagtgggagccatcctccggattggttgtcgtgagccctggctttaggatgtcaaggctgttccacacgacatgggaaggacaaacagaactgcctgtcccttgttcattttgatcttaaattaccatccgtagggttgaataatgcaataacacatacacagaggactttgtgagccgctctggactggagtgatacctggtatgttacataacttgggccaaagccggtgtggccgggctcttgctcagaggtcctttgtgttctcgcatgtttgtggagggcaccctagtaagcttcctggaagacggttcaggcttgcaagatccaggaagcaggaagtcccaaggacaaagctgtcttttatgaatgggatgaatttccaaacaaatggcacagagagaaagtgccataaagattgtaaggaaagagaagtcctttctgtttattcatttgttgcgcacctactcttgcacaaagccctgcttttccctctggaatgtgctgaccctggccccgagatggttccactgtttcttctgtgggcttgtctcactcgtgaaagagtgtcccaaatagtgactactgaagctgcaccaagtaataggaacaaatctcgttctgtctcctaatctttcttcctctctccctccttttgttttttacaactccacctcccaggccatgtggaagcctgcgtatgacttcttactcacctggagccatcagatcggggacagctaccgggatgtcatccaggagctgcacctgggcctggacaagatgaaaaaccccatcaccaagcgctggaagcacctcactgggactctgatcttggtgaactccctggacgttctgagagcagccgccttcagccctgcggaccaggacgacttcgtgatttgaatgggtcccctcccctcctgctgctctggagtgcaagccctcttctgccctgcgtgccctgctgtcaccgcggagctgaagagggaggaaggggcggctgctcagacagatttagggcccgccagctaggctacacccatcatgcgccgccctcctccatcgagggagaggcctgaagggactgcctactgcagctcgttgccaatcacatagctttctatttgttaagtataaatttaaatttaaaatcacttttttaacgaatggggggaagggatctatgagaaaggtggtatctaatttttttatggaccataaaggtttaaaagaaaataggggcacaggctgttgaggtttttatgttgttatagacctttttaaattatgttagagatgtatataggtatttaaaggtcactgggagcgtttctgattcccggccacactttgcatttcaacactcagcccggaaagatgctcgttcggttgttggacctctttcactccctgcgtgtaagaaggtgaatcacgtgggaaaaagtggcttttcagtaaacgggtacagctcattctttctgagaaggccccaggtcctgctccctcctcggatttgattgtcttccgtgctttgcctcactcgtagtaaatgaccatccatagaatatgtgaatctttggtgagcttcagtgggcagagtgaagtcccgcattagcatttaggtgccctgagctgtttctgccaatagattagaaagcagccatgagttgacagtctttagggcccctgccagtgtgcaattagtcattgacaagaacaatgccatttgagagtgaggtggtccctgctgctacgaggccattgtactgttttttccttgaggtcaaagcagtgcttcccatagagtttgctgcctcttctgtggacaggaagaaaacttcatgaccgaatcagagccttggtggccactgactctcgtgcttattgcagatgctgtggttggcctcacaagcaacgccttatgctgatgtgcagaggtgccagctgccatttgccaaactctgcatttcatttcatctaaggcttaacccctcttccttcctggtgtacctgtgtctcctcggaaggaagtcatagtttagatgaaaccattttttgtacaatgtaaagatcatctgagcaagatgagcattttgtaaaaatgaaaatgtgactcacataaaatcaggaacttgacacagtgttgcattaataactttagggtgcagacatgctgtgtgaatctcacaatgcgtcgtagatgtcgcgtgttggaagggagcaggaggaaggactgatactggcaaatcagtagagtgaggtgatccttagcaacgtgccaggacacttcctgtgtgcctgcagttgtcagggaccatttgggatcccgaatctcattctctaaaactgctttcttgaaacatgttacttccttagtataatcaatgtatactcccttactggcctgaaacgttgtatagctacttattcagatactgaagaccaacggactgaaaaaaagaacaaacattagctattttatgctgcaagaaccaggacacacaattcgccaatcatcccaccatataaccttcgattgtgcttctcaactccaccccataatttctcccagagaccatctatcaccttttccccaaagaagaaacaaaaccagttgcaccttaaaccatggatattttttcctcaggggctttaaatagtttcctatgcaacgtgtcttgtagcacaaataaaattctacaaaagttgcagtaaattttatttggatattttaacctgttaagtgtgtgtgtgttttctgtacccaaccagactttaaataaaacaaacatgaaacctaatgtacgtatttatacatacaccaatggctgcctccccaaaatagtcacccctagatgacagtaggacagctggtgtggcaggtgtctattttcttgctattcatttaatttgctcttgaaacacgagtcactcagtcaccactaaccaaatgggaattggtgttataccaggcacccaaaggaaagcacatcgatgacttgctgttttctgggtcccatgaattggcaaccccagtcccgaaatagaaagtttaggatggagtcatttctgtgtgtcaggtgtcagccttgaagtgctgattgtggcaaacaagggcagaccgtgctttaggaagaccgtgttgtgggggagaaaggagtgaaggactcctaatggagaccagctccacctggaggtagggggaggaatggggctaatggaaatctttcttgggaacatgactttgatgaaaggcttgaaggctgagtgggagccagctagaccaccaacagaccagccctggggaccagtgtgtcggcagcatcgacgacacggtacgtggggcaaggagaggctaaaccctccacgtggctgggacttgtggagtgagcacaagccctctgttacctggatgctttccaccgcttgtacctgtgttaattccaccatgcatcacctaccagctgggtcctcatacccattttgcagttaaggacagggctcaatgtggtcccataatttacacagccaataagagaggcagggaccttaactcaggactgccgtaacaaagtgccctgcatggctaaggacaacagaaatgtgtgctgtcaccgtttttgaggccagatgtctgaaatcaaggtatcacatggtcgcttgttctccatgtctgtgactaaatctctctctaaggacaccagtcataggatttagagcccaccctaatccatcaagacctcatcttaacttgatcacacctatgatgaccctgtttctaagtagggtcacattcacagcggggtttaggacttggacacgtctttttgagaggcacaattcactcaccaccctgctccatgcctggccctttgggcgtagcctgcttgggaagaacagtgcacgaatcaggtttaatctatcttggtgccctccgcccaacacaaagcaaagccagggtggaggaaggcaattcttaaaaggagaaagctcttctgatggactgccatgttcccccaagacccatcctcttcctgagccagcgactgggctgtctttccccatctcccttgcagtcaggtgcggtccagctaggagatgggaaccagaatgctatgggccgcctgctgttgagtctggctcacaggaaccttccagaaatcctcccttcttccaactgatcaggaggaactccaagtccctaaaggtgaggcaggggcagatagaaggaccccagatcccttagggacccccagtaagctctgttcagcaaagtgtctgtcacacggtatctagagaga

SEQ ID NO: 542 - DNA, 377210 bp, Homo sapiens
  source 1..377210: mol_type = genomic DNA
ttctgatgttagccctgactgaactcgctgtgcagcgtccaaccaatcctggtttgtgctgggccctggactggaacccagcccttcccgacgggaacgcaaagcggccacgagggggcagcgcacggcagggaatcttcgccgccgaccccagcccaccgccaaacttccctgctgctctcggtcctcctgtacgtacttccgttgctctgacgctcccagaagccggggcgtcgggaaggagagcgcgaattcaccctcctctgcgcctccgtaggaaaaaattggagcgggggttcacgagactgcgccgcggcgggcgctagagcccctcgcacagcgtcgccaagggtgcggcgtggagccgggcgcctggcgccagggtgctggtcggcgggcagcggcgccagcctccgacccgcgactccggcgagccaaggctgcgccgggaggagtcggcgcgggccccggggtgcccccttcaactggagcgccttcccctcctgccttgcggcgcatccccacacctacaccggaacgaagctccggggctgtcacttctgcgcgcttctcggaaaggagtctgaactgggagcgctccggggggtcgtcggggaggatgcccgggcgtcggctgtgtccccaagctgctcgccggcgctggcgaggaaggcagtcgggataacgccgcccaaactttccttcgcagcagcgttggcaggaaacgtccctctctgaggctcacgaaaagccgaaaaagactcggacgcttggaggaggcagggccaagcctgcgcaggagaggttccccggagccctggagatgtcctaggggaccaggctaatcgccggcttgcgcccaagcgaagggaagtcctgcaggcacggcgcctccttccctgagccccgcagtgaccgtgacctccgcgcgcacccccgcgcacgtgctcgcggccgaggaagaggaacggtcctgctgaatcctctggaggacagcgactagcgagcaggccaggggcgcatggaggtgccgcgggggcggtgcggctcgccagctgcgcggaggagcgtgcacgccgcgccccggcctccccggggacctggccggccgctgcccgcacttcctgccgctggtctcccaggcgcgagccgccgcttgcagcacagaacccgttgagcttcgtgcccggcagcacccccggtcccccgcgcggggcggacttgcggcgggacaggtgtagcccgcagccgcaggcgctgcgctcaggactgggcgggctcggctggccggtccccgccacgcaggccggtccccgccacgcaggccggtcggtgagccacttcgcaccgccacagccctagcatcgggccaccagccggggtgaagaaagtcacggcggagcccggctccccagtcctgatgctggctgccggtggcgggctccacgccggccccgggacctaggcagccgcgcgagaccgctgcgggcgcctcccccatgctgctcggagcgtcctggctgtgcgcatccaaggcggccgccgctgctgcgcagagcgagggcgacgaggacaggccaggcgagcgacggcggcgtcgggcggcggccaccgccgcgggggcgggcgaggacatggacgagtcgtcgctgctggacctgctggagtgctccgtgtgtctggagcgcctggacaccacggccaaggtgctgccatgccaacacactttctgccgccgctgcctggagagcatcgtgtgctcgcgccacgagctgcgctgccccgagtgccgcatcctggtgggctgcggcgtggacgaactgcccgccaacatcttgctggtgcgactgctggacggcatccgtcagcggccccgcgcgggcaccagccccggcggcagcccgcccgcgcgtcccatcccaggccagagtgcggcccccacgctcgcgggcggcgggggcggcgcggcaggcagcaccccgggttccccggttttcctctccgcggccgcgggcagcaccgccggcagtctgcgggagctggcgaccagcaggaccgcgccggcggcaaaggtgagtatctgtctcggcggaagtggccacggcacgtgggagtgtgtgggtgggtgcttgggcgtggggggcagtgatgaggtgcggaggagaccacgggtggtcctgcgttggcccactccgctgttgctcttcctccaacttcgcttgcttggtggcggcatccggcccctgggcagctcgccgcttgttcacgtgtgtcccatcctcctgtggagtgggcacgccttcctgtcccgtcgctcacccccgattccttggccggacttgttaccctgcctcttaaacttagcatcgcccttgcgtctccctagaaacggggaccttcttcctctgggtccccagacactccctctgcacaccctgggcctgcctagagaaaagttagcccttaacgtttctgacagggctctgatggctgctctgggaagcccgcgggcctcctgcctgcggtgtggctaaggaggggagggcagaaggcagagtgggactggggtttggaggaatgcttctagtagtctggaaggagttaatctggaggccccaggagccttttgacccagcccttttggacttggcagtgtctaaccagaagccaaggtcttctcctgggctcccaggcagggttgcattcccacgggggtcatttatatttattattattatttttggtacagccgcattttagggccttcgctgcttctgttttagacgaaagatcttctctggatggcttcaatgatttggttttaaaagcttcttacagcttcttattacacacccttgccaccttgtgaacagttaccaggagagagggcatgggatgctggtttaaatgagaaaagaaaggacccgggttttgttaatttctttaaatggagaaaagcacttaaatgttaaaaaaaatacattatctattggaataatcatttgctttagaaacacaactttattcctctacttttgaccatttaaggagttggtgatgcctagtccttccactatgtgtaatcctgaaatgctgggaacattctagcacctggattaggcagtactgcaaatctctaaggttaaggttaggaacttaaacccttggatgttgagcttgagttaaatgccatactttgctgcaatgggtttttttttctatggatcaggaagaatggggacagtcaaggatagtcactgggggtcacttggggggcactgctgaaggggaatttttttctttggttttaattgtgattaaatccagctaaatgcttgcgttagaaattttcaaacttttccttcctggccttgctgtttttgatgtaaggtatttataattaaatatctttatttgcagaataagtgggttaccttcttctgttctgataaattatgtgatattcggagccccgcttctagtaaaacgctgggacattctgatgaccatctgtttacagatgtcctctcagtttatcttgggggactttgtgtttgaccaggaggttaggaggtaacctctgacatgtgacaggctgaagctttgatgccactccgggaattctgtggcatttgtagtaccttttagaacttgtcaaaggggttgaagcttggaactttttagtagtgacatttagtattagcaggaaattgatgttttactcaccatatgttgagacccttggttgactttctttatgggtgcatagtcatgttcatgactttttgtgtttttgggatgtttctggatgttgtttaatagacgagcacttatttaactaataagcaggagtcccgcatggtgtattcacactacactagcactatactaccatgctgggataatagcattaggtccagcacatgcttcgggagtgggaaggattgtaatagcatatcaggcattgagcaaccctatacagttggttgacaaagatttcggctgaaaattacttttggtactttactgtccattggaattgcttgactcctgccaggaaagttgaatgctggatgttgttgcatgttgtttaatagaggggcacttatttaactaatatgccatgatagcaggtaaccataaatattacagtcccatcattttccaattagaagctccttacatcttcttttgggccaattagggtatgtatactttttaggtatataggtaagtattggcatagcttgtttactttattaattttgttacggttcaatattttgacagctttatttaaaaaaaagttttaatttctgtttggttttactggcaggacacaaaacagtgttttcctgaactctttacctgttgtttttcatcggttttggtgatcaccagagtacttggagtcccctgacgtggttagcagaacctctcagctctgctctcacctgagccatttgagataaagcgcttttgtggagtcagttaacgatgctgcccctggaaataatatacccagtgacgagtacccatagcctaagatcaggagttggtctttttatttgcctgttggcaaatactatatgtgtgttgcttcttaaagtgtgttcatatgtgttacttcttgaagtgacctttaaacagtcctgttttaatggtactgtctaacccttgcagttgctaatgtatgctaaatttctcaggctaacttgtttgtttattgttttgttttcactattttgcaagaaaatccctttaacatcccaagctagcatcaatcaaattgtttcagtgcagtgggagtcttgctaaaagagttttgtggttccacattgagtaattcaaaacatgctttttaatgtaagtgatttaataaggacttgaatatcagacaattccaattttgttttgaaaattttttaaatccttgacttatatttgagcctatacagaacatcttctgcagttcatgtagactcggctaggcactattataggtaaacaagactggcttgggctttctggatggagctgacagtagaggtagtgagtggttgcaagctgtctgcccagctctcagaaggtacccgtgggcactgaccggtgtcactccagaattctgtgagggttacaaggaaggacattgtcacaaattaaagaattctagaaagcttaggcagtgcctttgatgatataaaagtcggcattacagcctaataagtttatctgtattttgtatcttgaggtacagtggtatatgttcacattggatccgtttgaaaatctcttctgtgtctctttgacaatgtgactgggacttaatagagaaaataatttaagttggagaatcataaaattatatttgttaaatattttattttataagcatacacgtgtatgattcttccaccattttttgagtacagagctgaggacctttctttgagttccagattgtctttttagctgaacacagtcaccttttatgattttctatttgtttctttcaaatagagtgaagactaagattttcaaaggattctgaatagagcgtcatttagattttaaataggacctctccactaatgtttgatgttctcatttacacctgatttgaccattttgttagtgtttgagtctttcatacatggtcatcttgatttcccaagggacaatttttttttttttttttttgcactcaaacttctttccctgttacagactattgaattatggtgcatatttagcattatgagtacaacttgcattagcatagttgggaataaggacaacagatccctgataagcacaggcttccccaggcaggagtggctggcccagccttgccaggctgtagtctctggtgggtgtgggtgactttggctgtgttacagaggacgtggaatgttggttagtccagctggtcagctagtggaggccaggatagagggtgtctatggtatctggaagctagttaccatgttctttgggtctcgacagttgaactgcttatatacccgagattttctgttgaacatttactgagtgcctgctgcatgctgggcactttgacatatatcaccttatggaaagttcacaataatcctgccaagtggctggtataattattattttgaggcccagagagattgatatttgggcaagtcagagagctaggaagtgattgagttaggattctgttcctccgcccttctgtccagtttggctggatggttgggatgttgtcgtggttcggtcttggatataataaggactccagaggaaaaggctggcacttgggggcctcaccaaaaaccagacagctcacaagagaccaaacgagtggttgatatgacagctgagttacagcaaagtcctgttcagaaggcccctgagtgtggaaacagcagtttgcagccagcgagtgaataatctaaattattatttattgagcacccagtgggaccaggtgtgaatgaagcctctgctgagggctaagggttgagcggtgttttaagtgtggctcatctggtccttactgcaacttggtgaggttgctagttacacaggtacggaaattaaggctccagaatttccttgctgagcggcacacagttaatgagggtgttttttggaagattaactttggccttggttagaagagtcctcttactctaccacaggctcagctcgttggtagcacgattctaaacataagcagtggccaccccttccattcaccgtgcctcacggctgcagatgctcttctatgcaaggctgctgtcttgtaaacccacagagtgcacagagcagtgtggcccacaggaaacagcatcaaatctgttgtggctttggatgcaggtgacaggcagctctattaatatgtaagtgacatgaacaggacattagtctgagtggcctagctggctaacccagcagctctgtgctctcctcactgatccatacttggtctgcccttctgctctgctcctctgttggcttcattctcatccctacccagtaggtctcaaatagaggccgtggcttcaggtgtcacagtcccatgacaacacccagtagtggagacagcagggtttcttccccttgtacttagtctccaagtcggtgagcaaacggtgacccagccccaaccccatgtttcttgttacacccctggggacagtgttgcctcccaggctggtgtctgaagcccacacacaggactgccttttctcctgaggcggtggcctgccacctcccccaggacacgtggaaggaggggaaggggtggtgggaatcccactgaaggtggttttaatcttggcttccacacttcctcaccatctgccccggggcaaatgggctagctttcctgagacttgttatcagtgaattagggatgctatctgcttcttagataaataggataacgtatgtgcagtgcctggcacacgtgattggctgtcgtttcagtgcctgttcctaatacgaaaatcttcaagtctcttatcacgcgtgaggcacacctcagagtgcctgctttgctgctggtggatttgtggtatttagtattctaagttaagggtgtgtgcgtgtacgtgtgtggatgtggatgtgcatgggggggtgtgtgtgtgttgtgagtctgatatcatgctttgcctctagattcagtcagtccatgttgtggaaactggatcgtcaagcattactgggcatctatgcggagtagttgcttgagtctgttggtttcctttttaaatttgctccaagtttatctttattatcagaggcagtgttcatgattcttacaaacttcattaaaagggaaaaaacgtctaagccataatctgctttaaaaaaacagcaggggagaataatcctgctcagttgctgatccagcctgttggcaggctatcctgaaaacgagcccacctccgtcatccgtaggacacaatagcttgtctacagctgcctagaatcaggctgcttgctgtgatggagctgagcagaattctatccaattgtttcttcctcctggcttttgagagcctgcctgcttgctggagcatgacagattcggggctcagttttgcaattgtttctagtgtgcatttccgtttgatctgtatttaatctctatcttttacagttaacatgatcttttttgaggtgcattaaaaaaaaacacacacatcagcaagcatttgctgggggaaatgctcttgatagcaccacttgaagaggccaaggtcaatttttatcagatttgccttgcttgggagatcttcagatttgatgaatgtgaaatgcatgcttgatgggtatcctattggaattttaattaactttaaaagaacagggtgtcgagctgaaggtattggcaacagtgaatggtttacagatcatgcaggcaccccataatgtgagcctcccttttcccattgagtgaagttggaatgaaaaagtgtataaagttgcagcatgatttgtattctgctttctttaggctctcctggcccttgatggctctgcacatccttggaggccatttagagctgcagctctcctttgggagacctgaaggaggcccaagaagagtcactgcgctcttgggtagcacgtgtttacattgttaactgatgcaaacgaagatatgatggtatttgcatttccacttaatgtaatgtgtgcataaggctcacatgaatttatgtgagtttaaatgaattaggattgaccacaggaattcggatcaggaggaggtgtgagagaatttagaagcatgcttgcaccggggcacctgtaaatgtgctgcagccgggctctctgagagcaagacctcaccagagaatcagggagttcgcagggagccatctttaccctggttcaaggaatgggatgctgatgcttttctctctctggcttcactgcacagatatttaagtacctgctgtgtaccatacactacagtggacactgggggctccagggacagcgattgcattggtctctatttataatgaaatgtaattttttttccatttagttaggtgaccagatatgctgcagaggaaaacatgtgtctatatctttttattctctgtttatctggcaggaatttctaatgaggaaagtggtattggtgtgatttggggcttagtgagtttgcagtgggttctcacctctttttgtttattcttccatagtctagatttgccaaatgaaggctttgcacttcttctttctgaatctttctgactttgtggtggggaaagaagatgatgaggcaggtccatcccacagctggaggctttctgagagcagcttggtgttgcgggcagcacctttcagagaagctgtctgctgtttgctagttctggagcagatgctctggaagtgccacatgctcaggagataagagaacttgctgctgtggctaggacgatggaggtcaggagtgtccagcacgttttctgaagattcttttaattttttgttggccatcaaagcacaccaccttaggtgagaattatttggatttatcatttaggatctaagatacattcatgggtgactgcattccatttgttgctctaggatgaacccagagatactggagagaaagaggaaagatgagggaggcttaggcacatttcagtaaatggttgcaggttaactaatctcattagacaccacccgtcctgatcagccgttgtttttgcgttcaaagactaatcggttaatcctccaagctttgcctgccactgttgctgtttgatttgaagggtcaaggaatccttcagatgattactaaacacttggagtgctcacccatgtgggttgaggaaagtactcctgaggctgggccagctaaatctcaggccaggccgacttctggaggtgttgcctgtgtggagtgcctttacccataaatgcaatggcagacacatacatttatttcgcagatcaaaatttctttttttttgagacagtcttgctctgttaccctagctggagtgcagtggcacgatctcgactcactgctacctccgcctccagggttcaagctattcttctgcctcagcctcccaagtggctgggactataggcgagcaccaccacgcccggctaacgcccggctaattttttaatatttttagtagagagggggtttcaccgtattggccaggctggcctcgaactcctgacctcgtgatccgcccgccttggcctcccaaagtgctgggattacaggtgtcagccacttcgcctggcctctcagatagaaatttctaaaaaatctgtagggagaaagtagtggggtttcagttttgcatgtgggaaaaacaaaaggcttgggagtttagctgtaaaagaaaggacagttgctgttgttgctgggacttcaaggctgttgtaaaaattagcttggtgctgcatttgctggcaaagtggcaagcaaattttgagtaatattctggacttcatgtattgtattgaactggatcttttagagaggggtcagggcagcccctgggcagcccgctgctgctggttcattctagtcttcctgttcatctgcagtgaggaagtgggtcactcttcctctgggtctgcacaccctgcctgcagactgcagctgtagggaacacacagaatgaatggtggcccaggtgctggggctgtggagctgtcaccatggccctgtgtgagtgctgctcttgaagactggcccagaacgagtgatgttaataattaattcagtccacacatatgtactgactgcccaccctgttgcaaatactgtgttaagcactggaatatacattgttcacaaaaccagaagtgatccaggcctttctgcaactgaccattcagaggacactgtaaacaaatagccaataggtatctcttgacatgtggtaataagagacatgaagacaaggggccacagcctgatgatggcaggggacgtggagtcatgggtgatgtctgtggatttaattatgcagcttattttatttatcaaaatgtatccacatctttactcttttatggataagccactggattccttaactctttataatcatatcccaaatctgcgtaacttaaaaattgcatcctattttctcttcccaagcacagccaaaggtaattaaaaccagatgtgtttgcatgagaaaatgcgtgcagagcatcaagaatgtagattgtgctaaattaatgtcgccttaacaaagatagccaatgagactgacctttttttttttactgagttcatgatgcccatgggttaattttgtcactagcagtcattgtctggaccaagtttgtagtctaaacatgtgcagtatgaaaggtgaatgctctcacacagtcacactcctaataggaagacaactctcttgtatcctgagcggcatcccccttgtgccttctgtggctgaatttgtgttgtggactatagcagagggaaaacttccaatgctagaaatctgagttttaaaaattaatttaaaaatgtgttccttatggaattgggagtgtatctgctgtctcggtttgacaaactaagctttgacttgtgtacagtaacaagagttttcctggatttaaagttgttgtccccagcatatcaaatgaggtgacgtatatcagatcctgtggttgagcctcacagtgcagaagggcacctgctatgggtcagcagcccattgaacaatggagtttaagacttgcagtttttgagcttttcaatcacctctttgccaaagaccaatgtgtccattgcttggcagtttgacatctggagtcgtgtggacaggggtctacatccaaaaggcagcgccactggggcttagtttgttcaggtttgtgttcctaggcagatggaggctgtttgtctcaaatatagctgctttaaaaaaacaggagggtttattgatcagaggtagtgactcatgacgttgaaactgtgcctacataactcacatgacaaggctggggtgaagaggacaggtctgcggaaggctttccacttagtcctgggaggccccttttccctctgtccaccgtcccctcctgcaccatcactgtcacttcttttctgaaggctgcattgatgcacatggttggtgcatatgggtcgattgatgcacgtggttgcatgtggttgacgcacgtgtttggagttctctctcttcctgagatcagctgcatccagccatggaccttctcttttgccggttctttgtgaatcataaatctacttataatgcctttacatactgatgttctttttctatttttcccagacttcagaaatttcttgcctttttttttttagagacggagtcttgctctgtcccctaggctggagtgcagtggtgcgatcttggctcactgcaggctctgcctcccaggttcacaccattctcctgtctcagcctcccgagtagctgggactacaggcgcccaccaccatgcctggctaatttttttgtatttttagtagagacggggtttcaccatgttaaccaggatggtcttgatctcctgacctcatgatccacctgcctcagcctcccaaagtgctgggattacaggcgtgagccaccatgcccggccaatttcatgctttttagatttatgggaaatagaattttttcccttctgcaaaaggcctatgtgctctacacgtggttaatagccagtctatgcaatatgattgatgttaaaggtaacatctcctctgtgtccccaaactaatcagtgccccatcttagactatcaacacctacacagtctggccccaggggtatcagttttccacttggtactatcactgctgtaaacaacttcatgggctgagaagcccttactttcataacccccaccttccatccggggctgctgtgaactggacaaccctaaagcatcctgacaaccagactcctgttgggcaggcggtatctggctggtgtgagccatttacatcagttgtattgaagggatcaatgctatgctgggacccatccttggtgctcattttagtcgacttcatccaggtggaaagatgcaaccacaccccccggagcccaggtttctgcggattcctctcttttgtctcccttctgtgcagtttctggctccatttttatttgttcaggctgtttcagtgacccttcctcactcttcccctctgtgggccgtgcgcattcctggcaaccagtgctctgtcggcttttgcagttgccactggctggctttctggaggcagcctctcgtctctgcctgggtccctcttcctccaacttgctcagtgatgagtggggctcagagcctcactcacaggctgccctccgcaccgcgccaagctcatgggaggggctcgagacctctgcagcacctaggcacatgcctgcctttcccagtgaccaggcccagcccagagctgagcccacagctgcagagatcaccagtccccaggctgaccaattctttacaggtgtaggctgaagctccaacccactgcacttttctctatcgtgaaatcggatgtgaatttagggtgcagatcccaggaagagtgatgacgcctggggataacagtgtgtcttgacagaagagttaggacccaaagccagcatctcccaggagaaagcaaaatagtcattttctagaccccggggaacaagtctcctgacagtatcaacaggagggggtactggttggagaaggaggtcagggtgacggttgtgtccagctcagcaaagccaggtcctcgcctcctttcacccatgggaccccccagatgtgccagtctgctgtcggctgcctgcttctcctacctcctgcaagctctgcaggtggcagggccctttctacactcacggaagtctcaaacaaacttctgtgacacctcctctggtgtgtggccatcatttccagccccctgcccaagtcctcttctggggtccttgagtctcctggggggggggtctcaggtatgtgcctagaacttctgctgcagcccctggcctgtcccctgggccccaccctgagtcacctaccgggtggggtccctgagctcctggagagcagcaagggaatgcttcccatggtccagccccctgggcggactcttgcgcctttgtgactgggtgagctgtgcatttccagttctttgccagctgccccacctccccacccacatcccttccattggtgttctcaggaataggtgtttacagtcttattttttcttaaaaattcccatgcatgttatattctactctaaaatgtgcctcctctgattttaataggaccccaaagcaccctgtggggttagctccacaaacttggaatcaaatatgtgtcccgtgacttcttcccattccctggcccccagcacccacacaggcacccagcttgcaggcacagcggccgagagtgagggaggggctgcctcctgggctccccagggacaacggggcactctgctctccccagtggctgagggaggaggattctagtcctgtcaccagaagcctctctgggttctctgggggcagaacgcctctgcttggctgcatcttggagccctccatcctggagtcacctgtgaggtcaactgagcggagcatgggctgtcgggcctgggtttattttctgatcgttggtgtcctctggcttcacctgccaaagcatcgaggattgttgttgactgatggaagtgctataggcttgtcggtaaatgtggggaaaggtggctgtcattgtgggacgttttcactctctaaacttaagtgggaaatttctgtcaggttgaggaattgtcaaggatgtcggctttcaaggtgacaattgtcgtgctgacagatacagcacatgggtggtagtggagtgccgggggcttggggctggtgtcctggctgctggagtgtgatttggcactagagatgaggaaagggaaagtgccactgggatgctggtattcctggtggtgtccctgagcccgggaacccagtgtggggggcctgccatgatggccacaaggtaacctcaggaggaacctgggaaacgttttatattaaagttttcatttaatggtccattctgtttgtcaagtggtgcatatagaaaaattgtggcagttgcatggaatttcatttggaaacaaatttaaataaaaagtgagtcaatttaaaggaactcattaagtaagtatcgtgaaactgaggcttggaggaccatagtttggataaaaaatgccttaagttgaagtgaaatcagaacctcaaagcgagatgtgcaatctcatgttcatttcagcattattcacagggccaatatctgaaagcaacccagatgtccatcaccagatgaatgataaagaaagtgcagtgggctgggtgcagtggctcatgcctgtaatctcagaactttaggaggtcaagacaggaagatcgcttcagcccaggagcttgagaccagcctgggcaacatagcaagtccccatctctacaaaaaataaaaaaagaaaaaaagaatcagctgggcatggtggtgcatgcctgtagtcctagatacataagaggctgaggtaggaggatttcttaagcccaggaggttgaggctgcagtgagccgtgatcgcaccactgcactccagcctgggcaacagagtgacaccctgtctgaaacaaaacaaaacaaacaaacaaacaaacaaaaggctgcctgtgctgtgctgtatacacacacacacacacacacacacgtatatacacaaacaatggaatattattcaatcttaaaaaagaaggaaatctttccatttgtgatggcatggatgagcctagaggacgttatgcgaagtgaaacaagccacagacacagaaaggcaaatactgtgtgatctcattcatatccggaatctaaaaacactgaattcatagaagcagatagtagaaaggtggttacgaggcgccggaagtgtgggaagaggagatacttgtcaaagagtaacactttcagttataagatgaatgaattctggagttctactgtgcagcatggtgaccatagttaacaatactcgattatatacttgaactttgctaaaagaatagattttaagtattttcatgacaccacgaaggtaaccacgtgaggtgatagatatatattaactggaatgtatatgtatatcaaattatcacttgtataccttaaatatatacaatttttatttgtctgttatacctcaataaaacaggggaaatataaatttaacatgataatgaaaagtacttttaaaaaacacacaaagctgcctcaagtcatagaacaagcagacctagctttcaccatgacgtctctaggtttgttctttcagccctggtttcctgtgtgtctgaaggctcacgcccagctgtggatgtgctgaggctttgtatgagggaagagtttgaacgaggtgaatatgaggaacagggcaattttatgcttgcaagcagcgttgggaaaattgctttgtttgatttttaaacctaaatggcaaacatgagaaacccagcctttgggatttattttggacatgacaggtgttccccgagtccttatgccactgcactgggtccaggttgggccactcccaggcccacctccagctggtgatgcatgcctggcaggggccacctcacactgtctgcatcagtcaggcaccaggctggagcctgagccacagcagagcactgacccggggttgagaaccaagagacgggcagggggcggaaggcatggtgggaataggcctcgctcagcaagctttgttcccagagctggggtgctggggcggtgtggacactgcgcactgtggggtgagcgcgttcagtgccgatctcagggcagcgggctcacacccggctcctgggctctaacaggtgtggcataagaaactcagggctccgtgtcaggaagggccctttggagaagctcgtaagcagagtgttaagggccctcttacggggcctggagtcatctctgagtcttccctcaccggctctgtctgtgtctccaggtttggtcatttctttctcttgtaaggggcagttcactcctgcctttctgctgcttctgagacagagccgtgtcctggctgggtccttcctgaccacggtctccccagtccatctgtgcctgtggccccggtgattgtcttaaaatgctgtttggtggttacaagcccactcagccccctttagtccggacttcatgccaggtttgcagtcccatggccctgctcatgaccctgtgagccctgcccctctcttattcctgcactgtgttcattcctgctgttggctctttgcttatggaagaccggtcgccttcaccattggtctgtctgtccgtgagggaatgccgcctcctttctcatctgtgggaggctgcagagaagccctcatgaaaggggctgcttcctcacacatcctccacccctaggctgtccggggggcctcactgttgcacgcatggtcgagcgacctttggcactgctatcgccatgcgtttctagactctcgtggacttcctaaggagcacttttctagaatttatcttctggttgttttacaggtcttgggtgttctcacaggtcaggaccacaccatccgttgagcctccccacccgtgtgaaagggcgggaacccaggagcagtattggtttgttggttggcatggggtcaggggtgtagtggccagtggcaatgcttccacatcaccaggctgaaaggcaggacggagccgcagagctggggaggctgcgtagggctatgggtgtgcgtggagccctggagcccgaatgcctgggttcatgtctccctccccacacattgttgctgtgtacccctgagcaagtcaaggggcttggcagtgtgacctcccggccgcagtgtccttgtctatgtgggccgacggagtccatgcgggccgagggagtccatgcaggaaaagtgctgagagaggtaccagctgaacagttagatttagtgaaggtgaggtgtcaccactgttactgttcttgagtcttaagttttcattagaatacgtattagaatgcatggtacactaataatggccattattattggagctaacacttgttggtcacttagttctggctgctcttatagccagattaagggtcaggcaaagggcatcagtaaaggtccctgaaatgttactgggacaaattgccaaagggatcattccagcttcccaaaggtggccagggcctcaagagcaaaagaatactagtgactaatcactcctctgtatcactggcccatttctgtggagtctgtggagtcttcttgcatcaattccgtgccaagaggcctccagtgtggtggacaagctcatgggtcctgtgaatgttcaatggcaggaggaagggcacttcctagcactttcttgtttctgtttaggatccaagaagcctacctctgaatgcacgctctccccagcaccaccttcaggcccagcccttcctccaccatgggtctgcaccatgggtggctgactgaccatctccttgaggctgctttggtccccaaagtcaggctgggaccctgaggaagggcctggattggggggccccatagagtctacatctgagtatctttttttacaatccttccttcgaaaacttgcggatctctcctttctttagtgccccccccattccttctgttttcctctgtcctccccttcctaaccctcccctcccctcccctccctctcttcccctcttctcttcttttttccctccccccccccccccccgccccaatatcctatgaaggcctcagagtcctgttagaaaacacttctggcagtaactgttcccatctttcctcctgggcccttccctgggactcatctcccaacctgatgatgtctcaggctttctcctaagtagaggctctgccctcccaacaactgtccaaacaagttctcttcttccctgtctcgttttcccctcttggtgaccctggagcgagtcagagggtgggtttctttttgtccaaaagacagaggttggctggcacttcctcaaggtgcctgggagaaaagaccgggatgcctggactttcttggaattacagctgtccgctgctgctgagaggtttgctcgaaagatgtaaatatgggggtgtggggaggtggtgctgctctctctctatcagaggcacatcagggaacctcaaatgcttttgtggacgagactatctctgcgctgataagcaccttgttgttgctggggccagatgaaagatagttgttgagttgcagcttcagtatgctgtttgtatactagagaaacatcatatctgtgcgtatttataattttccatctaccacttggtcaacagatctgataagaagcccacacttgaaggaattagcactaaatggaatgctaaacatagtaccgtaaatggtccaaaaagaggcctagtcaattattcaggagggttatatcaaggtctcatagcgtgttatcgattcccagttctcttgaaaatgatttatttgtcaattgcccatgaagtgacctttcttgtatagtttccggcttctgggtcttagggcactttggttttgtaattttaatttctcttctaaatatttacgaagttaacaagcagttgttttagctaaaatatcccgaattggagcctagcccattgatctgtcatttaataactcctgtagatgagtatgcatatgcatttccatatatacatataaagttagaccttttataaactctgcgtttatagttattgattggcagttcatctctttaaatgaagagttttggggactagctcatttctgctgatctttacaggtttgcttaagatctgtgggcccctcaaaatccatggtatcatggacaaggtcagtcgggtggtttgttgcatggtgactgtggaattcgagttcagggaagggaccatctggctgggctgccagccgggtcctacacagccccctttgtgtggccttttggtctcatgcacccagtatgcagtgtgttcttaccgatggtggaaacctggctctcccacctgcctgctctaggactcaggcaaattgggtaccttctgcagtatctgttttctcttgtgagatgggccccgatcatgccacatgagcagagcacgtgagggaatccaccgggacggtgtgctgcagccagcccaggccagagcgccatccgtggttcttcatgtcactatggcagagctcatgagccagccatcatagggagggcttcttaaaggcgttctttttttccctttttggacaaattggtaagatgctgtagctcaaactgtgtacaaatttctgcacgtgtgggctgatactttggaagaatgaaagaagggttgagtaattggctctggggaatattactgctgactggtgccattttgatgagtaatagaccccattagatcacagtaaaatactcgattatgtataattaaagatggcattagtcaggcagaagccacagcgtttaaaaatgtgaaagggataatttctaatgctgaaaagtgcattcatggctgaagaagcagagcgtaatgtgtagtgaattgagttctgaagttactggggctcggtcatagacagatgcttgtttagcaggacagctggtgttcttttatttttaggtctcaaaaatgtgtagggacagcaatcatggcagtgtttttttttaaaaagtattttaggtgaattcatggcttgtggaacaattctgattggtggttttacccaaaaaaaatcaagttctagactttattctttgtggagcagacagagcccaggcaagctttgggaatctttgtttccctgtttgcacttctggctttcaactgcagatccccctttctcttctcatttattcatttgctctttccttccttcagaggcttcaattgagtgcctcatgcaggccagacactgttctgggctctgggaaggagcagggagccaagctgagactggcctaggagctcacattgatggagtgggcaggactcagggcagggccacactgctgtccttggtccacacccactgcttttattcggacttctctagtcagacactaagaatgttctatggccccccgggacccgttctctgggagatccattggcttagagctgagaagtctctttggcttgacttgagctcctctactccatttaatcaagagtcaagtgtctggcagagactttcgttattaataacgtagctattaatattcacattgacagtcatttgcacttctaaacctctttaatctcagaggttgccacagcatttcatggacctcagatgaatggcttcaaaggaaggcacagggctctctaccatgaggacccaaggggaattcgcttgtttgacagagcaagtgtgttaaggcagccgtccctgggtcttgcatgcaaggtccagcaggaggacagctgagcatctccctgcacgtgtccattgagcacccacatgtcctttggctctctgtggcagcagcaacgttgcagagagcaagatagtctggcctcgtggtgcttacgttctaattggtgccatgggggctctatcaagacgttgtgagtaagtgacaattggaaaaccttagctacagtggagatgctttgtagtgcaggtatttttgtactccagttggacttaattaagattaaaataccagggggttctttttctgctcgtggatattttttgtcccagtggaaggttgaaatcactttttaattgcagctgtgttcttttattaaactagtggttcttgacttggggtgcatgttgaagtcccctggggaacctccccaaacactgatgtctgtctcagcccagggccctgtgatgggtctgggtgcagcctggcatcagattcaacggtccccaggtgatgccagtgctggggtgagcagcactgatctaaactgcagaaggccaacaaaaggtggtgtagaggaagtggttgtgagagccagcacctggagaatcctgccagatctgcacctggaagatgagttggacatggccaggtaaagagggaggaagagtgttccagcggagggaatggcaagcatggaagcctagggtcctgaggagcttggagcaaatgaaaggaggggaagggttgggggagggggcatgaggctggagaggatggccgaggcaggtggtacaagaccatgctagggatttttgtctataacctgatgatagtcgaagccattttatttatgagcctggaactactctgctcattatttcacttaaaaaacaatttcttagaaaaatagtttttttacaaaaacgaggaattcaacttattaattcacttagtctgtttaaccacacagtgggacaggtatagataggtgctatgattacccccattgtgcagacggggaaagtgaggcccagagaagttgagtagcttgtcacacagctggtgaatcgtggagctgggatctgagctcaggctgcctctggttccagtctggctctacatttctgggggattggtgcgatgagcctcatttcacagagcaggaagtggaggtgtgggttggggttagaattctgttctgatctcctcaaatctcacactgttacctccttatcaggctgttcagacttggggagaaattaaaaaaaaagttttgtgcttttaccatactataaatgtgaaaaaaaatatgggcatataagtcagtgggagagctttatggctgaacataaagagcattcaaataaagaagctagttatttcaaggtgctgatgggggaagtcaggtggtaccttttccattgctgaaacattgatgaaggtcgacactgcttatggagtgcaatgcaagggagaggcttttatggataatattgcatcattgcacaaaagccaacagccacaccaatgtatttgccctgcatttggtgaggggtggtggtccttgggttcttgcttatatttgatgggttcttgattcacaaagtgcaatgaatatattgaaaatatgtgtccagtggcccaggacactgaggtatctgtgctgtcttcttgtccgaggctttttcatgtttgtggggctccatgtttgtggccatggaaacagactgaatacagaattttttccttcctggaaatctgtgcctacacgtctcagaaacattcatgaaaagctaatggtttaacaggtgttcaaataaaccatcctttgatggttcaaattcctaattttatactccaaagcagcaccatccaatacaaatagaatttgagccacatatttaatttaaaaatttctggtagccacgtcacaaatggtaaaaagaaattggtgaaattaattttaagaatatatttaacccactgtatccaaaatatgtcggcatgtagttactatgaaaacttattaatttgcatcctttcatccatgctgagcctgaagcccatgtgtatttcacccctgcagtacatctgaggtcacacttcccggtttccagggcccagtaggcatgtggtgcccacaggtggctgctgtatggaaaggctcagctctgacggatcagaccacttcagatatcataataaagttctggcaccagtgcactttttatgactctaatagatttgcatctgcaaattgtggtttataggcaacaatatgacatttcctatgatttccgaattgtcatcatgatagaatctgcagaggactgcaggaatttttggtttgaagttaatataataacagcctggagggcttataaaatgcatgctgagaaattggtctgaaacccagattgaggatatttttcatacccagctgattatttaaatttcccaatgggaagttattacttctctgacaagtctcatcagcagtctattttcagtggtcttgatggacatggagtctaattttgtttttctcctagcctctttttggagaggatgaaatttggtgtctggaattacatttcttcctaggaaaagtgctcagcgtcttagaaataaattatcacaaaactgtcacctgtcaggtggttcattttccgaggtgacaggcagtacctataatcacgggaggtgggcatgttccccttgttgttgtggtgtgtctttatagttgtggggaatgtgggtgggtggcctgccctttccctggtgcatttggcaaatccctcttatattgcttttgttagctgacatgtacagcaaatcaaataaataattctgggctccgatctcaagttgagaacgagagcataatagccttgttccgggtgcctgatgggcctacagtggcattacagcattcagagcgaaagctcatttactggaaacaacgaagtgtttgaaagttcactgcatggaaattggatttttgcctttttattatttacattgtgtattatcagatttatatttaaagctgtggggattatcattctctttaaacggcattatttaataaagagtaagcatttcatggtttcaagactgctgaacccagctcatcattggaaattcaattaatgggttccaacttgagtaggcatgggcagaggggcgggggggacccagtgtcccctcccaggcccgatggcctgatggtggggtgcctatcaccgtctctcacatgggccctctcacagtgaatatcacctgtctttcaaactttaagagtaaatcttagtacttgctccttgttctcgatggaggcacgcaattgaaagctttaatctctgggatgaaaacttctgggaaaggcagtactttagtgtgaagtcattgttgttatgatgcagctgagtttgagcctgtcttagaagcacgttttgatgggcagaaatggacccagtctacagacaagggaccatctgcaaagacaagacagtcactgtgaagcttttgtcagaaaacccattcccaatggagggggaaggaatcagtggggcaaatatttcaatggaacagaaccagcatctaaacttatgcactgcagcgttctgctaaaccctgctatgggtgaggctgaatgagtacattcatttctaataaaagaaattacattaattcttgaagggaatgtaggtgtttaagctgtcactggaaacccatttctgagaagaagctaaaattgcatgcctttttttctctcttcttcttagtgatttaaaaaaatttgtatttttgctgaggtttggaaaggcaattacgctgattttgcccaaaatttggacagattagttctgctgagaaagaagtaacgaaggtatgaaaggacatgaaataactgaaacttgccaggagaaatattaaggtcaaaagcagaggaagcatgggctcggctcagtgtgcaatgccttatcaccgggtcacctgccccaggaggtgggcccgacagatgccctgtgtgtgtggaagctgccgctgtgaaagagtgtggcatagtaaaacatgagatcaccccagttattttatttctgacacactgggaatgaatcttgatctagtctccagggtgtgtacttgtctgctgtgcgttttgtgctgagctgggttctggtgcattttggctaaagccacattaaccaccccccgacccccgatgccaccatcttgctggagctgagatttcctgcagacctgcttcctgagggctgactcctggtctcccactgctctgggacattagcagtcgggacttgctacaccagttgcagggccgaggacaaaatgaagtgcaattataaaattattaagaatttcattacgtgaccacagagcattaagccaaatttgggcggcagccaagtgacctggtcagtgattctggttggtggacatggaactgcagacaagaaccttctgtgttgatgcatcaaagtatgaacactgtcaatatgctgtggttgccagacttttatctcgtgtgtttaaaactggtttctagagctttgtcttggttagggttcaaaatgtcatccctacatggggctcagcagatgggtctaatcaggcctagcatccatgtggtgctttctgtcatttctggcctcacttgggtgaccacattggatggaagctgggaaatggagggaccaaggaagggagcccctgtttcccagcttgggtaggtgattggggttatcatggagggggtggttttggggaagcttctgggtagggagtacagatacacagaaggccccccagcgctgctgccattgtctgccagtgttgaagctgcagcatcatgggcacggctcctgggaagggaccaccagcctttttgaggggccaggcctcgaggcttcctcagctggcttgaattcttcactggtgaagaaaccaaggctccctaagtttgaattggccctagttcatggccagaagcccactgaaggtcacagtgccctggggtctgtctttctctttgtcctggcttctggcctccaaatgaatacttttggccttgctgtagtgctggccagggtttggacaaggtcaggtgggaccagggtttggacaaggtctgtggggggtgatggtagggactttgggccatcccttagaagtctcagagtgtatgtgtttttggagacctgtggtgacaccaacctgctgcatagagccttctgaagccccactttctgctatggccttggattgccctaaggaaattcttcgggagcagagcgagctccagcttcctcaggtggcctttggagagtgttggctttccaaatcacgacttgtcaaaagaggctttccagatttcaggacatgttggattgatagccagccttcataggagtcatttttctgttgggttcataaaatagagtggagtgtgttctggtgtgctcatggaagctggggctctggcctccctccgggccagggcaagggttccatgagccacataaaggcattttgcaaactacaacttgctatgctgatgttcggtggtgttcggcattttgcaaactacaacttgctatgctgatgttcagtggtgttctcatccatgggcaccttgcatctatgcctattttatagtatttgtggaataattttcccattttaagtgattatagagttggaagttggatctttgttttgttttgttttagagatggagtctcgctctgttgcccaggctggaatgcagtggtgggatcttggctcactgcaagctccgcctcctgagttcacctgccattctcctgcctcggcctcccgagtagctgggactacaggcgcccaccaccacgcctggctaatttttgtatttttagtagagatggggtttcacggtgttagccagggtggtctcgatctcctgacctcgtgatccgcctgcctcagcctcccaaagtgctgggattacaggcctgagccaccgtgcctggccggatctttgttttgatgacacaattttggctatttgtgatttatttcaagcagtgcctggcctgtaactccatcttgaattgtaacactgttcccatgggaactttgatagggtttctagcagtacttgagaacaaaaagggagttcccacatcctgccaatgttgatcatagcacacgtgctggtgtgtgtgaataacgtagaatggaagatgttccagaactaggtggtcagccttcaaactgctaaagctttgttataactattttggtagctgtctttccaagatggtcatatgtattgtaacaagtgctgtattggatcgggctaaggtttccttggcaactcaggatcattctgcatgctgtcactgagctctgcagggattctctggggccccagagccccatgcttcccactggggtcattttgcccctgcctgaaatcacccgtactttgggaagctgggtcctctcctctttggctgccactttgcaggatgctgcctgcttgctagccatcctcccaatttctgcattgtctgatttgcagtccatctcagcagtttggagctcagcttcttaactcagtgaattagcactcggtgttgagttgtgggttgagggggctggcagtgctgccttggctcacacacagtccaaccaccagagatcgagttgctatctcatcttcagtgttttctccgcccctcgcatcttcccctgctgggactgtgctttctctcctagatggtgatcttgctggagaaggaagtatccactcgggtgtttgtttctgaacttttgagtgattcaggggagaggatacactaagggatgaattttaaggtttttttttttttgagatgaagttttgctcttgttgtccaggctggagtgcagtggtgcaatcttggctcactgcagcctttacctcctgagttcaagcgattcttctgcctcagccttctgagtagctgagattacaggtgtccaccactacacctggctaatttttgtatttttagtagagatggggtttcaccatgttggccaggctggtcacgaactcctgacctcaggtgatctcgcctcggcctcccaaagtgctgggattacaggcatgagccaccgtgcccggcctgaattttaagttttttaaaaagggatgtgaagggttgttgtaggagatagaaacgtaggctctctgctgacctgattgccagtttaaaactagacctactcacagaactgaggaatagaggaggcagcttgtgatttattgctaatggctaatggaggcagttaatgctttctttccagttcaaatactatttcttatttaaagactaccaataaggttaataaaggtttttatttccctctgaaatcacacataaatgacatattactccaggtcatttttccatcataggatttgcatcatctgactgtgggaagggctctccttggtaaacacaggtggctccaggctcatagcaccccacaggaccttcttaggttttaggatgagagcacttgaatttgatgtcccagagtgttagaatgttatcagaggggatcatagtattgactggggatattcaccgtctcttctactcctcagctctgctggtaggtctagttttaaacttgcagtcaggccagcagagagcccgcattcctgtctcctacagtgatccttcacagcacctttttaaaaacttaaaattcaatattgcattacaaatattgcattcgctttatagactcccacgtgccatccataaaaatcatttaaaaaggtgaatatgtgtaatgttgccttgaatataaatgacattttcaatctgtaaaaataaaatatctgcatttccatactctctggacaccctctggatctgaaactggccttagagataatctcattgggtcttcaagaacatatgaggaaaaagatttccttggtctcatctggttgttaaaagaaggagattggaacttgggcttcctgaatcccagtctagtgtgcttcctagccacctgaaagggatataaagatgtgattcagttggttactgagctgcctgttttatcacctacaattgaatttaataggatcatcctgagatgccatacaaatttcttgatgtcatcaacagggactttgccctcatcatccagagggtaaaaggacacctttatcaggattgaggattgtatgggaggagcactgcaaagcatgtccaggattaaggccacacagctctcctaggagaccctcaggatggcttttctctgtggcagctgctcgtgtttgatttgcaggccgctaatacaaatccactgtttagtgacgagggagtacttgccttactagtaagtaaccctccttgagcccgtggtatgttctagttctgggctgcgtgcttcaattgcactgtgtcatctggctcctgagcctggagctggactcccattttacagacaagcaaacagaggtggcaagagggtcccatagctagtaaggtgccaagacaggactgtgacccaggcatgtcagacttcaaaacacacgactgcaagctgtgctgggaaatgattgctctggggaggacactgtcctcaggctcctgtggatgactgacaggaagtccagggccacctccaggctcccggttgccacttgtctctttctggtacaggtgaatcagtgatggctttggggactccctcaacgcttaggtgtcctcttctctcatcctggggagaatccagtgtgtaagtgcaggagtctgcatggcttgccttcgtgggtcattgggcaccatcctggggggcaggttcagctgagggcaggttcagtcccccaaggctcagccacttcatccttcacactgaaagatgccttggctgggggagctggatggtgtcatgtccagaggcgctcagggctgtctgacttgcagacagagggtcttcacctcgctgcctgggatgataaggcttgtgtctcaggactttgaggcttgagggatctaagtcgtgagagcatccctatttcttctgataagagatttgaggatttctgagaatcagatgtaattatgccacatcatggatgaatgttttaacacatattctggaagttgctaagtgtttctttcaaagcaagtagcaatggctgattcccgagtgtgcactctggaccagccctggtctacatgctttatgtgtaaaagttcagtgtgtccttatgacaagccagccagctgtgaagtcaaggcgggtggatcacctgaggtcaggagttagagaccagcttggcaaacatggtgaaaccctgtttctactaaaaatacaaaaaattagctgggtgtggtggcacacgcctgtaatcccagctacttgggaggctgaggcaggagaattggttgaacccaggaggcagagggtgcagtgaacccagatcgcaccactgcactccagcctgggcgacagagtgagattcggtctcaaaacaaagaaacaaaaaggtgcccttacacagtgttcacccatgagaaggggactcaggtacagagcagggtctgagccgtggtgccaggctctgctttgagcttcccctccctgtgctctgctgctggccttcctgcatgggctctatcccggcgcagctgcctctctctcaggaccgctgctgtaccgcggtttcctcgtcctgccgagagggtgctgcctgccctgcccagccccagggcgagggtgtatgcgtgcagaagggacttgggaaccagggcgggcatgaggctgttggcatttctgtaacggaggcctcctgcattactgtggattttagtgggggaagaattggcttgttttacaagtcagctttccttgttaatgagctttccttgttgctcacagcttattgtccatgtagtgagtacagttgagaaatctggctgttatttatgacaggggtacccaatccctgggccatggactgataccagtctgtgccctgttaggaactgggttgcacagcaggaggtgagtggcgggagagcgagcaaagctatagctgtatttacatcagctcccatcactcccattaccgcttgatttccatcttttgtctgatcagattctcacaggagcacaaaccttattgtgaactgcacatgcgggggatttaggtttcacactccttatgagaatctaacgcctcatgatctgtcactgtcttccgtcaccctcagatgagactgtctagttgcagaaaagcaaactcatggctccaactgattctacattatggtgagttgtataattatttaattctatattacaatgtaataataatagaaataaagtgcacaataaatgtgatgcgcttgaatcatcccaaaaccatctccccgccaggtccatggaaaagtcatcttccatgaaaccagtccttggtgccaaaaaggttggagactgctgatttatgacattatcagtcaatttatgggcccagagtgtcagacctgggccaggatctgcatgggccaggtgtcaccaggaagtcactctctgccctcaggaagctgagggtcttgtgggatgaacagccaggtcagtcggtagctgctgagcagggtgacccatggagtgtgacagacaggcatgaggttgctgcccaagacagaggaggccagagagggctttcttggggtgcagcccatgctttgttgggtgagaaggcaagaaacacatttgtgtgcccaaagcagggcagggctaaagttggaaatggaaatgaaggagcaggtagccatgcagccttgtgctttccagcaacagggtggacacttggtcccaagaggacgcagctgaaagaccctctggcagggagaacgtgtgaggactctgtggtggattctgagttgtgcctctctggcttaatctcatctgattctagcagtaactccaagaggtaagcacatttgtgagtcctgttttccaatggaaaagctacatgaggcccaccaggtcccagaactcaacaatggtggggctggggttcaaagccaagatctctgactgcaggggctgtgctctcagcctgtccctgctcctactctgggagctggtctggaagggtttggggactggctgagaaatgtgaacatccccaggggctgaggcgtgatgctggaagaggtgcatttggggacagtcatatccagctgtaatggacagggccaggagaggctgcaaggctgcaggtgggccactgtggcaggagttgtttgagtgtctggggattagaggattagagcctcaaccaggggtgtggctgagaggagggcgtggcaggggctcagagaggtgggggatccctgggagaactgagcctggcactagcttggatgtgaaggctgtgagagatggagaggcagaagtaggtgagggtgcttgtgatcacaaggcaatcgactgttcatttagaagagaagccgtttgaggcttcctgatgtatccttgttactaggcataaagcatgagcaatgccaacaagactggttctttcggaacaatagttaaatcctgggggcaggtgagaggtggggaatccccaccttataagtcaggcacgagtatgcagtgatgagttgagtttagttcagggtgctacagagttaggagtgtgtaggaagacaaggtggggctaagtgtggtatgcacgggtttctctctcccacctaccagctgggtgactccaggaagaggggcagcctcctgagccttcgtttcctttctgtccagtgggaatgtgatgcttcctgatggtctgttcttcccctgtacaccctccctggagcatggttgggtgacgtgcattacatatcgtaaggcgatgtttcctggggaggggaacatgtcttagtctagcacctacctaagtctgtggaagttaataaagaaaaaaaaggtttatttgggtcacaattctgctgactggaagactgggcaactggcaagggtctcaggctacttctgcttgtggaaggcgaaggggagctggtgtgcagagatcatacagtgagagaggaagccgggagcaggacatgccaggctttttgtaacaaccagctctcaggggaactagtagagcaagagctcactcaccaccacccccagggagggcattaatctattcataggggatgcaaatacctcccatcgggccccgtccaacattggggatcacattttaatacaaggtttgggggacaaatatccaaactatagcctatcacctatcactcagtggtgcctcctggggaggggagggttgggggctgtgtatcttatatgtcgcaggtgtctaaagcgtagatggtgtcagaaagtacttcccctcctccagccccctccttgggatgtgtcctcaggatctagagggagtttatggatgctgatttgggaattctgctggctggcagagacaggagctgaggatggacacctgcttgttttcctttacaaatgctttggctctaacattgacctggaaagacgccaggacagataccatggaccttactttatgtgtgcctaggcttgatctccttagaaagtctcactgaagacaagtggtggtggagcatctcagcagagctgttaaaattcctaaaaggcgctggtgtaaatacagctactgcgagaagttgctctgacacgtaagccctcagagagccgggcctctctcatttttcccctcttagggctcctcaaccttttttaaatttatttatttatttttaattttttttattatactttaagttttagggtacatgtgcacaacgtgcaggcttgttacctatgtatacatgtgccatgttggtgtgctgcacccattaacttgtcatttaacattagtccctacaaaggacatgaactcatcattttttatggctgcatagtattccatggtgtatatgtgccacatttgcttaatccagtctatcattgttggacatttgggttggttccaagtctttgctgttgtgaatagtgccacaataaacatacgtgtgcatgtgtctttatagctgcatgatttataatcctttgggtatatacccaataatgggatggctgggtcaaatggtatttctagttctagatccccgaggaatcaccttttaacaatgagaataatgtttagccccttggctgggtccttttctcaccttggtattgcagggttagagatgattaccaaaaaaaccacctcttggtttttggcttggtggtaagagcctcttggctgatgcctttcaagatagctgaaattgtcacctctccaagggatttgcaccctctctgactgagggactcctttgatttggagggaaaagtcccccaaagtctgtatagtgatagctggggcactgatcccgccaaataggaggctgaagttgagaataatagagccttgttgaccttggcagcttttccacagtggaattgcaggacccagcaaggagatcccacagagtctgagaactgagctcacccccgaggcgggaataggaactcgcgggcagctttggcacaagcccagaactatttttggtgtgtggtgtgttgactgtagggctctgccatttgtttcttctctaatgaaacaggtgattaccgtgttgaaagaaaggaaattgcaagtgcaagtttaagggccatcaaagggcggactggagttctcaatagattaaccaagagcaaatattcttttttttttttttttttttttttttgagacggagtctcgctctgtcgcccaggctggagtgcagtggcgggatctcggctcactgcaagctccgcctcccgggttcacgccattctcctgcctcagcctcccaagtagctgggactacaggcgcccgccactacgcccggctaatttttttgtatttttagtagagacggggtttcaccgttttagccgggatggtctcgatctcctgacctcgtgatccgcccgcctcggcctcccaaagtgctgggattacaggcgtgagccaccgcgcctggccgcaaatattcttaagcttggagacttcacgattccacagtgagtaactggaatcgccatcctgtgtgcagtcggcagctcaggataagaatgaaacttcttaataatggctctgcttccctccaaacaatgtgttttccatgatctctctggtctattaccaactatttgtggttggaccaagtatgaatgaaagaatgcacttagagtttgatagatgggctaggactggtttcagttttgtgatctggatatgtttttgcttcttgatgtccttcccttccccctacatcctctccagggctttagtttgtttgttacaatgagattctacatgatttttgtatttataaatttgcttctaaggtgaaccccactggctgtgggggatggaggaggcctactcttctcttgtgtctgttaaatccttaaggaattatttttggtccaggaaaactctgatgcctctctcttttttttttcttttactttttttaaagagttggggccttgctctgttgcccaggctgaagtgcagtaacatgactgatcataactcactgcggcctcggcctcctgggctcaagtgatcctcccacctcagcctccctgagtagctaggactacagcacaggctgcaacccctggctaatttttaaaaattttgttagagatggggtcttgctgtgttgctcaggctggttccaaactcttggcctcaagcagttctcctgcctcagcttcctgagtagctgggactacagctgtgagccacagtatttggccctatttaattttatttttctgtagactcttcggccaagcctggctgtttcccagtttacagctagtatttactcttctacccattcaaactttcaccttttctagaactcagccaggcagcaatgtgatggtaaaggtgtaaaaattggatctttgggagggggaaaaaagagcacttacttgtatcaactgccagtttccaaggtgtaaatactcccatcatgatcaatcaggctaccaatgtgatatcacctggcttgcagaacctctgcaatttaatagtcagccctggcaagctggcaaaaactgccactggcaccctattgagccaggaagtgagtttctaacttcccctttcttcctgtttctaatcaaggctgcaagttcctttagggtttcaaaggcacttatggatgatggtcatgacactacaactggaccattgcaaataaaaatgacaatggggaggtcgtaattgtttttctttttaaagcctcttcttagtcatcgtcttccttggaatataaatgaggaaggccagtttccttcacggaatcattttccatctctgttggcagtgggcctggacagaattctgtgttcttactcccagggctagttgttcctggcttcccccctcctttagtaaggacaaatgaacttaggtcatcaacttgctgcctaagccacattaaatcatcaccctcaaaagctgagggaagactgtgctaatcctgcaaagaagtctttactaggtgtatcaagaaggttcagagtcattttgcaggaaagagtaactgctggtgctactggcagggccactgtttgcgttttctcattccctccctcatccttcctgctgcaaacaggagatgttggcggatgctgtccattgacagggtggttggagaaatgaggatggtgtgctcagagaccccaccacccctgctagaaggaaagttaagtttggatggaaggggaatagagagaagtcttaagacaggagctgtcaaactatgaccagcagtagttgggacccagctacacttgctcacagatgccttgtctgtgggggactgtgtggccagcaaaacccagaacattttgacccttgacagacattgccaactctgccttagagcactgtgctgcactgaccacaggagtgaaaaggccacacttggagcccacatagcaggtcccccatggcctggtggtatggacgagtggggaggctttctgctgcccccactctccccactcagatccttcttttttttagttacttaagaatcatcatttagcatgagtgtgttaaatgagtttatttcagcacatttcagtgcatctgtgactcaccctagacattcagtgctctacgtgtgcccaggctggatgcctgtgcaagaagaccatgttgtttgtgacatgggtggtcactagttttatgttttagtgtctgactttagctctgtcttcctttcctttttttcccgctgctattgcattattcatttttccttttcccccagtttgctgctcattctgtagatacataccttggtgagcctcactggagagctgtggcacctttcagagtggagactggtgggggcagagcttaggaatgggtcaggcacaaagaagtagtgcagacttcttaatatggttggctttttccctcagtgctcagtgtttcaaaggaaagatgcaggccaggcacggtggcttatgcctgtcatcccagcactttgggaggctgaggcaggtggatcacgaggtcaggagatcgagaccatcctggccaacatagtgaaaccccatttctactaaaaataaaaaaattagccgagtgtggtggtgtgtgcctgtagtcccagctacttgggaggctgaggcaggagaatcacttgaacgtgggaggcggaggttgtggtgagctgagattgtgccactgtactccagcctggtgacagaaaaaaaaaaaaaaagaaagaaagatgcccttcacctctatgtcaagctcattggtagtgttacagctctctctgctcaatgtcagccatgctgagtcatggaagagtcagtaagaaaagattattcagaaaaaatttacagaaaatattttgagacattccagtgagggagtgaaggggagaagtcctgagcagaaggaatcgagggagcagaaaataaagacctgaagttctttttcaaagcaatttggaatgtcttcttcctttttccacatcttattggtgattgccataggttctggcatctagcttcagttttcaactatataggttaaaactgtaagtacaaaactatacttaagtataaaactataatcccccatatatgattttaacaagatttttaagctatacattatacttagggcttactactttaaaacatgccattactgtgtttatgcatgcaacatgatgcatccataaatctaccttcttgtaaaagggccatcccctttgcctccagcaagctaagtagcttgagcaatgctaaaagaacaatacacaccactcatcggtgtcccgtgggaataccatggaggtcaggccagtgggaacccagaagttaaattaatagcagaactgcttcaggagtagttctagtaagtgttctttatgatatggttcctggcatatgggatttcatttttccattttttccagaaccaggatagccatatttttaaaaaggatgatggcggagaaaagtggcatttttagaccaaaatgtagctaccaatttatgtagctgcttgacaaatcataggtacaggagatgcggtagaaccaattagaacaagacttctcagcacttgcaggtggaacatgaattgaattattagctctctctgatgcctggaccatatttgatataaaagtattggggagacttgaaggtttatatcctggcaaggggtgatgattggtagaaataacccccaggctaggagagctggtgtcttattcattatttcctgttttacattgtatttccccagtcatcccccattggtattgtttagtgtctgaattcttttatttaattcatttatttatttagttgtttatttttgagacagtgttgctctgtcacccaggctggagtgcagcggcacgatctcggctcactgcaacctcagcttcctgggttcaagcgattctcctacttcagcctcccgagtagctgggactacagacacctgtcaccacgcctggctaattttttgtatttttagtagaggtgggattgcgccatgttagccaggatggtcttgatctcctgaccttgtgatccacccacctcagcctcccaaagtgctgggattacaggcgtgagccactgcacccagcctagtgtctgaattctctccacttgaccgtaagcttcatcaggtaaggagctatagttgtgtttattgttgtatctttcacatgtagagaaacatttattaaatgttgaacatagtgatacaaggtgatctctctaaatgtggcatgggagggaagcctgttctgtgcaaagtctctgtgggactttcatttactaaaatgaaatcatcctacacacccaattaagacagggcttttatgatgcgttgagtgcctccttgttaggcttaaattgtgtgctttcaggaagccaaaacagcaatgaagactgtgatttgcaaacattgcatcattgggttacaaattcagagcttttctggagagatcaaaactatacattttcaccacctgatggggtctgactgttgggaaatgacattcctgttcttgcattatttctggtcatttggtgagtgatctcagagtgcagggctgtctttgttcagaacccagctatcaggagtgagatgaatggaaaaatatgatgacttcaagagccttgctaatgctagctagattcctgtgcttgcgagatgggctcttggcaggagggagagggcaagatgggctctcagcaggagggagagggcttccctgttcagagggggaccttctgcaacatcttcttacacttgaccttagtctcttcctacttctaatcttcggactgtaatgttgcccagactgactgatctggccgtaggtggtaagaatcttacaaatcgatgccatggactggcagctgctcaaactgaaaacctttcagtcaggagttcccttctcttgggtctgttgtgatgccttctggcactggcttctgagaggccatcagcactgttggcccttctcattgccttcttcacagtaggaattaagcctgaacagtagatctctgtcttcctggtgggcaactgtgttttttaagacctcagtgagagttgtctttggaaacaaatgaatggaacgctgcatgctggcctgttctctgctgtatcttcaggactcctgagccaaacctgatttcatcatcttctcgagggctcagtacacattgagctgtcacctgtggtgtgtggcctggaagaaaggcagctcatgagtttgcctaacaggactctcccttggtcactgagggctgagaagtggcactaggaaccaccactgaggcagcctttggaggagccagaattctttggagcaggattgctggtagatttgttagttgtaaggcccacatctcgtcatatgtactatttaataatactgagttgtgactttatttgtggttagaaaaccagctatgggacaaacagtgctggtttgtctctaagcatttaaaatcatttggaaagtgtttgtacttgctgagaggcgggtatattatttttgccaagttcatagtaccatccattggtggtatgaaattaatttctgagcccaccaagtttcaggaagggtcccttgctccatactatgatggtgatgatgtggctgatgatgctgtgctggtgaagaacacagctcagctccctgtggtggaggagggtgttgaattgtcggggaggaagctggagggagcttcttatctctgctctgtgctctcttggtcatgggtccattttcatttctgtagcttctaaggggtccaggctaaaggcataaagttgctttatgctgaacaaactgaccgagcttagcaagtaggatagctctccataagtttaatagggttgggcaatgtatttgaacatagcatgtgtttaattgttttcattgtttggctatatctctctctctatatatatctatatatataaccaaaatacatatgtataaaacaaccatacacacacacacacacacatgaccccccaaaatcaaataggctgatagattactcagaaaaagataagtcacataggaagtgggctatataaaaccagaacttccatgaacacagatgctccctcccactggcacctggcatgcatggcaggtgctttatattgaagtgcagaagtatatgagttttaaatctttaagagactttaatgttttacttgataacaaaagaaacatcacatcctattttcctgaatagtcctttatcttcatatggctcataactgttatagttttgataatcatggcattttggccaaaacactttgccagaaactataatctctacaagtttccttaggctatgaaggtgttttagaggattataattttacatacccctaataccatcgtcggctcttgtttccttatctgcagatgaacgagatgttttctttctctctcttttttctcttctcttctcttcttttcttttctcttctcttctcttctcttctcttctcttctcttctcttctcttctcttctcttctcttctcttctctcctctctctctctcctctctctctctctttcctttctttctttcttttttgaccacatcttgttctgttgcccaggctggagtgcagtggcacaatctcggctcactgcaacctccgcctcccgggttcaagtgattctcctgcctcagcctcctgagtagctgggactgcaggcgcacaccaccatgcctggctaatttttgtatttttagtagagatggggtttcactatgttggccaggatggtctcgatctcctgacctcaacctcgtgatccacccgcctcggccacccaaagcgctgggattacaggtgcgagccactgtgcctggtcaaacagaatatttcctaagggttcatcctgctccacagtctgaggttgttatttgttaattaaataaatatttgttgggcattgaccatgtgccaggcactggggctcaaggggtgcggatgacccatctgtttctctcaggaagctgacatccaggtgcacagggcatagtttacctgtgaacagagagggcgcttttctcccctcagtaagctaccttgcgtcaccttcctctgttcaaagaggactgataaatcacctcactaagcagctgttgcctgcaggtagcccacaccgggctgggtgctgaggcacagaggcacacagggcgctccccacaggaaccaagcccgggaggcacacctgcatgccaggtgctgggggctgggggagtctgtgtcctggtttggttcatgggcatcctggttttatgtagctcacttgctgtgtgacttatctcttcctcagtaatctgcagcacctagatcattcaggttttgttttgttttatatatatgtacattttttggtttatttatgtatataaagtacatacatcaccaaatataaccatattatggctgtatttgcttacatgtatttggttgttttggttatatatgtagagttgaatgtccttttatttccttgtcatatctatttcttatctatagcctgttaagaattcaaagtttttgtcatctctatacaaaatgatggctatttgttgttagtgactatgaatattcggagaaaattatctgcatattgacttgaaatactcttcctaacaaaaatgcttcccctcctgctccacgcttgcccccctaccccgacccctcactgctgctgggctcgcgggtatggtcagcgctgtggcttcgcccgcggcgggccagggaagtgcattagaacacggagcacagggagctatttccttctcgccgcccctggtctgtgcagagctgcctctgagacatttcctgtgcgggaatgaatccagggctccagggctgtttagtctgggcctttgggagttcggtgcagctaatgccttccagaggcccagcccctgcgcctggcgctgccctcctggtgcccacgctggctggctccctgccgtgcatcccggccacgctcacttgcagcggggagtggctgcctgccccaagctggcctgtcatccaggaatgaagatgttctatttgtgttttatatggattcactttgaaactcccattctgtgttcccataaagggcatgcatgtgccgagcccagccttgactccctcctttcgctgtggtgagcttgtttattttcagcgtgattctcagctgagtcgcccgtttcccaataaaaggcagggcccagcactgtgggctccatgagggcctgtttggttgcttggtttggagcacgagggaaaacttgatatgcacgtcatttcccagttccaggcaatgacctggggcagagcgggtggggagcaggtctcccggagccatctggaatatgccgatgagtgagctgtgcattagctctcagaccagggtcctctggcagccaggcctctgagcacagcgtctgaagtatcagccgccacagggatctgtgggcaacagctgcgtgtggcctgtgctgtttctctcctgacaaggaccttgcaaacagcgtggaaatgcgcgagccagcggtcaaacccctcttcaccatgcacggagctcagccgtcctctccctgctcctggaggtcttcctttttctgtgactgtaacctaaaaacattaaaatacgtttattgagatagcaaacttttatcctcttggtgtttgcagtgaaaatagtccttaatggtgtaattttcctttcttacctccctccgcttgtcccgtcctagctcttgttattccaaacagtgtggattattgggctgcacctggccacccaggctggtgttttgaatcagcagcatcacctctccggagcccatagcaggaagcaattgtttgggatctgatactgctgggctctcattttccttgtcttagaaatggggacacatgtctgcccatgttgagctctggcagggatgctggactttttgtcctagctaagaaaccaaactgcatgtgggttacggaagtggtctaagtttcccagtgccagcacgaagcctcgactggtgagtattgtagaagagcactgccttagctgagtccagtatttctcttccaaaataaacgtgcatgttcaaagcaattgcttgtctgtgggtataactgttgtgtgactggtagctgtgggaacacactgagtgtcatgtatgaccttgcgcttgtcttcacgcagatgtcagtaagacttccaaagtctgtgttggtcatccctgggtggtgggatttaagggaaaattttactttcttcttcatgttttctgatctatttaagtttcaataaatgaacatctttttttaactcaaattttaaaaatttgtaacttctagggctttggaatctttttttcttcatggaaatcgaacacagactgagtcatggttcttagaattctgtaattatcaagttgaaaagaaccttaagaattgtctggctcagaacctgggattgagatgagaggctcctgagcctgcacttgcgttttctcctcagactctccttcctgtgctctgcccgttatcaaccgagccgtccctgcctgggttgtctatcgtgtgactgtttcagataaaggcgggttatcttggtttggaagaattcggataaatgacatagttcttcattgcctctccagttgactctgccttacccacaggcagatttaaggctggggttggcacactgcctgcaggctatgtattgtctgtggctgcctaacaacagagctctaacagcagagctggtggctgcggggaaggccacacagaccccgcagcctgcagtggttaccgtctggccctttcatggacccctgctgagactcattagacagtgggatgtgagcaggagacccacggcaaagacagtgaatgtaagatgggaaatccgctgtctggaggggcagtgtctagggggaccagggactgtggtagcctgcctgtggtgtgtgctgtgagctcagtgtcggcccctgaccaaaggcatgcgatggggctggaacactgccgtcgtccttggaattggatgttcagactcagctcttttgctgttgcttcatctggaatgttctcattaggaatgtgaaatccggtgtgggccaattcttatgccctttaaagcagatgtcgggttcaggctgtgggcactgagtcctgagactggcattggtggcggaaagcactgggctcagtccttgattcagagaacacacagcagtgcggtttggtggctgctcccacagtgtccccatagccttccttgcctgtgcagtggccccagtggcttcaggacagcagggctgtgccatagggcagagcctcccaaccagaggctccaggatgttgtggagttcatgaaggtagccatggatgtccctggccattttactgtttcgaagagtaaggtggacatcacagttttatctatgactgggaaacacaggcagagagaaggactaagttgctttgttttggcaagaggggagaggaacagacatgtggggatgcttcctgtgtaccagactgggtgctgggtttttgacttcctttcattttttttctataccatacctcatgcagttggcagccaatactccacagctggggcgtgggtgggaccagagtggtgccctgatcagagtaggcaccaggccacactcacttggctgctgccaggcccagccagggcaacgggcagtcctggaatcaaagcctgtggtctttctacaacaacccatggtgtctggaattccctccattgtggctatggtgttcgtatctaggtggctgaagccttgctatgtttgataaggaacaggaagataaatggttaataaatgtaatatatttggaagatgatattttcaggatagggcacatgcactgaggtgggagattttaacccagcgtctttggaggaaaagttggaaatgatgccttgtgtggctcactcgctggagccctgctggcagacccatgagggcaggggcttagcgtgcaagcttcagggataggatagcaggagcacaggcagtttctttctgcccctctgtcaacatatttcagattctcttttaggcttgtctagcactgatgtcatctaatggggagagtccttgcatttgccttaaatagggtatatttaaagagtgatttatacctttttccaaaacaatatattgcccaactgtcttttggcttccttgagtagcctttatttgagtcgcacagcaaaatcccatatttaaatgattttgagatgctgctaagaagtgcattcatgcctactagtagtcctggtcattatcagtcccactaaaccgggacctagtcctggtccagactagaaattggagtccatcatttcagagtcagtggtgacgtcagtttggtgccatggcctgtggtgcttcctgttttccttgcctggcacttgtacttcatcctttcccctattggcacgctaatctttgcatggttttatcttgatgagatgtctgaggggtttgtatttcatcctgcagcacagaaacaaaggttagctcattgaaaagcaaacgctggtgaattcaggcacacttggaaataaatgcaaactttttggcagtcgtctgtgtaaccaggaagcttcacgagttggcaggtggtttcacatctgtttgttcctttactcaacaagtattaactgagagcaaacaaggatgagctcatggctcccctgaatgagaccagcactgtggctgctcaggtgcaggagctgcaaatctgaaatcttaggttattgctttggctgaaaagtgcaatctcagtggaaaccttatttttaaggatctccagaatcagtaataggacacattttgggttacctcaactaagggacttttctaggtagagtgtacataaaaatgaagtaagtaactttgaacagtgtaattgtaatctattggcttcaaagagagtctagagtaaggagtaattcatcttttaacagctgtaagctgccatgccagtaatagttttttaaacatgtcttttagttttgcatcttaattatttattgggtatgcactaattaatttttttccagggagttctttgaatattttatagtaatactttatttttctggatcacttgtgctgaagcagatcagagagcaagcagaaaagatccacgtggtctaattgatattctgcatgttatatccttgagactctgtcttcactgggggcctagctcctttgggttttggtcagcacactggaaagcctcattctgtccacctgcatttcctgggtgtctgccctttacttggcccagtgctaaatcttgaaaattcaaagggtaataaccaacatacaaccagtgggggaaaagcagacttgtgcaatgattattttgtgattcttgagtcaagtagcaattgtagagtttaataaaatagaaaagggtacagaggaggaagccaattaattgaaaggttatttcattgagggctggaaggaggtgttttgagagaagacagctgagcagcagtgagatactctgagagaacaccatgtgcaatggaatgctgtgtttttaggagcccaatagttgctcacaatttcttgatcaaaaggcataggggccagccatgatggctcatgcctctaatcctaacactttgtggggccaaggtgggaggatcacttcagtccaggggttcaagatcagccttggcaacataatgagaccctatccctacaaaaaattaaaataaaaaattagccaggtgtggtggcacatgcctgtagtcccagcaacccagaaggctgaggcaggagaatcgcttgaacctgggagtttcagatttcagtgagctatgatggtgtcaccgcactctagcctgggtcacagagccagaccctgtctctaaaaaagaaggcataggggcatggaaacaggaatggaggctgttccgctggcagaagttaggctcagccgtgaactttatcttatgtgacacggcattgttgaacagttttcagcccatgatgtgtatttaggggagaaagatcactagctgaaggatagggatgcatttgtcagggtgagactggtggaaaggagattgatcacttgggagatttggcattttaggtgaggtatgatggcctcaagagagccctgcactggggtgagcaggcttttccccagctttgtcagccacctgctgtgtgacctggtggaagttacatttaaatgttccagagtctgagacaataagctctgtttactgggaaagtcactcgtgtggtgctgagattagccatctgcctttatcttttctttacagacacactcagcccagagtcagaataagggggactgtgttttcagatgcaaaaccagggacgatgatagctcctgtgcaggattgtgaagcaggaagattaaatgccaggcctggggctggtgcagagaaggagcccaatgcatggtgattttcttttatatctactaagaaagatacttagggtggtacaagggactgcaactaaccaggctctgccattgtagcatgaataagttggacatgaaatagtctggggcagagattttttagacttggggcctgtgatctgccagagggttcatgcatggacttggcagctccgtgactccttggaactgtgtgtgaagccactatttaacttctctggggagtgtgactgtcacctgctctgggggggggcaccattcctacaaagttagtatcagtggtccagagaaagaacaaggccacagggtgttgaggtgagggtgagggtgaggggagagatgatagtgtctagaccacacagagatcctgcttgtgtagtaatctaaaaactctgaataacttaggacaggtagacttcccaggaaaatgctaagaacccccttcaacttgatcctctagtagatttcagatgtaagaaatattaaagcctattagacaaggcaatttgtttgatttattctggccaactgccagatggcttgtaggtcaagaacaagtaaagttgtttgtttaattcacctttctcctttgaggtaggatttctccattaaactggaagtttctagcaggagtctcatttgatttgccaacatgtttcccaaatcatctaacataatcagaaaattagacctaaacaaagggcctaaatcttttctcccaattgttcaagtatgtttctttgctaaggtataagcaaacaaacaagtctaccctaaaactaaaaatattttctctttctatatccatatcaatctgtgctgctatacaacaaacctaccctttcttagggtaaggaaaaaatatgaggcaccaatgtaccaaacaaaatattttcatatgtatttcatacattgcagagtcatattctataaatttcaggaacttagttgtcaacgtttttatctgcctctttgctttaatttttagagctcttttatgaatgttctctattgcaattcattgagcccccgtgaataatactgcttctgctagaaatgatatatactcagtgtggtggaggaatattggtggtatgctttagtttccttttttttattgttttgtgagctctagatggtctcctgtagcaggtcctccagagatattatacttggatagtttatattctctaactgtatttgtcagagattattcccaacattgctatgttttatttatgtcaactctttaacccaaagcctttggactcaaatacgttatttttcagaaccaaaagagtctgtggtgagacagcaaggcagggcagttggcttatttatggatcatgctcctcttcctgtcctcccaggaattcactttgtcaaagttcttgtgtcgttcacatagatctaattaacatttttaattggtgtgtcgtgtagttctggaaactgcttattagatttcgtaggtgtctctggcagcacaaaatgtttaatgagcaaaataattgtgttacagtgaaatgaatatggacatattcactgaattaataaatgaattaaatgatgacttcatggaaacctcctgagaaagtagttatggaccatcttccctgtgtaagatattcaaattaacttttcgtgtttgtgtgaaggttttgggggaaatactttttttcttataaagtataataatgtgtgtgtgtgtgtgtgtgtgtgtgtgtgtgtatttttaaaccagaatgagagtctgtaagtaaactgagattcacattctttaattgagcctcagaagagtctgtgaaatgtcatggcagctggaaggaaacgagtaggatgtacaatgtccctgaccagagaaatacgtatcttgcagctgcgtggaaattgagataatcaaaattaggttctacttcctgttctgacatgtgatcctttttatcctctgattctggaggtgatggccaagaagtaagaggatatataaagaaaggtagtctgtagattttcagagctgctgacagtgagtccagactcttcctgtattagatgaaaaagcagaacgtgagaggacatgacttgcccagagtggtggctcggagctggggggtatccctgagatctcttaactgctgcccagcccagtgtccttgtctttgtgtgttttctgttgctataatataataccaaagagtgggtaacttataaagaaaacaggtttcatgagctcacagttctggagactgggaagtccaagaacatggtactggcatctgatgatatccttcctgctgtgttgtaatatggtggagggtatcacatggtgagagggcaagaatgtgctagctaaggtctctcttcctgttcttctaaagccacaagtcccatcatgggggccctaccctgatggctttatctaatcctaattacctccaaagaccctgcctcaagatgccatcaacatatgaatttggagattgtgttttcaacacataagatctgggggacacattcaaaccatagccctcttggctaaaccacgctgtctcttacccctcaaagtgctccttatcgcaggaaaatacaggggtcaaaaaagtcactgacgaaagaactagggctattaaacaagacagaggctggatcatttggacccaaaggtgttcttaaaaagactctttgggttgcaagaatcagacccattcaaattacctcaagtggtgggatcttattgtaaggtttgctctctgtggggacccaggcacagctgaacaaatgggcctccatggggttaggaaccacaggagaagtttttttttttttctctagtctgccagtcacacagctgggccctgttctctgtctacttccctctctacctgtgctgccactgaaccactgccctccactggtattccccactagtcagggcttcggcctccttcctttgcccacaatctctgcttctctctgagtccgctgcctttcctgatttggcagatggtattgatgactttttctctgtttcctgattccatttcccaaaagggaccatctcattggctcagggaattacttcacagcaggtacacagaggccattagctagccaatgaactggctcctcaggggtcaggtgacttcccctggcccagtgatatggtttggctctgtatccccacccaaatctcatcttgaattgtactctcataattcccacgtgttgtgggagggacccagtgggagataattgaatcatgggggtggtttctcccatactgttcttgtggtagtaaataagtctcacgagatctgatgattttataaggagaaaccctttttgcttggctctctttgtctgatgtcctccatgtaagatgtgacttgctcctcctttccttccaccaccattgtgaggcttccccagccatgtggaactgtaagtccattaaacctctttattttgtaaattgcccagtctctggtatgtctatcagcagtgtggaaacagactaatatactcagtcagctaagagtgtggtcacaggggcttcaggggctgagtccagggcaagcttacttggaagggaccaccccatgcagagagctctgcagtgggatttatcagcagatttctccatgcaatatgtttaccctgatgcaagcttcctcagattgataacattccaatcctacttaccaattttccccttcttgacaaagtcctttgatggccagcccgctgtgcacacacagtactcacagaccctccgtcagcatgagcatgtggaggtggtgaggagaagtgatggctcaggaaggtccttccagctcgtctgtgtttggtgttggacttctgtgtcagagtttttcaaataaacctgttatttgggaatgatcttaggtttatggaaaagttgagaaaacagaacagaggattcctgtataccccttgcccagtctccactaatgttgatatcttatgctaccatggtacatttgtcaaaactaagcaattaacatgggtacattactgttcactaaattacaggttttaccagggtttcagcagtcttgccactcacgtcttttttctgttccaggatccagtctagaatggcatgttgcatctggcgctgtaagggtttgtgtgaagaaaggattccactggtgtaacacacacacacacgcacactaacaaacacagcagaaaagtacccaaaagtttctttatcctctggtccatgccacactcctactttcaccagattcctctttattaaaagttatgtttttaccttcccctccagcataaggacctgcagtagatgcctgttgccgaacacaccaaatccaaatttccctcccggccacagggggttcctattctctgagtctactctcctgcctcctctttcttctccagccatggtagtggatgctaggttccatctgtctccctgcctttttcttgacatctctgagcatacttcatccatgccacattctaagaccatttttccatgacctacaccttttttttccatcctggcaggaattaggtttatgtgttagtatattctctggttttccttttaggctttactgtagttatattgccatggctgtaagggccttgaatgagcaaccaaaggccagtttggtgatgtttgctcattgctcaggggaggaggagcctgattttgaacttcaaaaaaattatctatgtgataaacatatgtatgccgtaaacctgaataatttttgaaaagtaggtaattgcttcacctgttgaagcatgaagaggtttgtcttacttagttttctgctgctatagaagaataccacaaactggataacttataaacaatagaagtgtatttgactcatgattttgaaggctgggaagtccaagagcatggcgctggcatttggtgagagtcatcccatggcagaaggcatcgcatggtgagatagtatgtgtgcatgtgagagaatggggctgaagtccctgcttttataactagcccactcccatgacaatggcattaacccacttaggaaggtgaagccctcatgacctaatcacctcttaaaggtccaaaccctctgcattagggatcaaatttccaacacataaactttgggggacacactcaaactatagtgtcccagaaaggtgtctgcatagtataatctcacatagtcaggtgtttttcttcctggatgtgcttgggacatagaaagcacatggaacttgcacaggagatattttgcattaattgcaagaatgaatcgatgttgcgtaaattggtgactaaaggaatgaatgagtgggtaagtaatggctccagttacattgtaatgctttgaggctaggctggtatttccttgatatcaactactgcagtggtctacatataaagtaattctcaatttaaatgatttcttatttttaattttaaaattaaagtgtcaggccaacttggatatttgaatttctaggaaatagaatgctcaactgcctgtttctaatatatagtttatttccatatgcatattgccatataaaattatactgtttttcactctcatatttcataaaataacttaaacgtttcccatgaatctttgacattggtgtcttcatcatcacaggaccccattttgggtctcctaacaggtttcagagctcatcatccttccacatgactgtgtcgtgagatgtattttctagtcgtttttatcccaagccacaatgactaatttattcagcactaaaaattaactttttaaaagaaatctttagaagattgtgtacaaaactgtccagcactgtccaaaactgacccagaattgtgggtcattccttctgggttaattactgaatctgtgttaacttgccttcttgtatactgattctcaaaaagcacatcctgagatgactatcagttgagttagtttcaggcttgtgtattttctccatatactgctttcgtgttcttaataaagtaactgataagtgctttgcaaggtgagagtctacacagggaaccaaagagatggtgaactctcccttgctgctgggtgattttggaaacaaagctctaccttatatctagatgcatatagtagttcaactcccacacagtaaagatctggaaattgaagcctggagagggagaggtttcagtggccttttgaaggctgtgccttttgtgtataaaccaggactagaacatttgagtcttaccccagctcttcacaattcagccttaacttttatttttgagataaaaaaaatgagaaattaacttcttttatcctgcccgtccactcactctttgattctgaaaatgtacagttcatccctgaaaacaaaaacaaaactgatgagtctctcagcactttcctacatggagcatttgatcctcccagcagctcggtcaggtcaggaattatttatactctttacatataaggaggtaaggccaagggggttaagttacctgtccaggggcccctgccaggccactgtgttgtccctgggccattctctctagggcattgtcccaaggaaagtgggctctagaatcccagagacctgtgcccccacacctaccagttgcaggtgagtgccccagctcctcagagcctcagttattctcttctgtagaatggagccctgtggtccttagtggggttgagtgacacggtgtgtgttgagtgctaggtgctgtccagggtatcacgatctctctgtgaacgtggggtgttgagcccatgtggtggttccatgtgcttcgtagtctcctgcatgtgcttcaaggcactgccccagttgccttggctggccctgtgatgcttgggtaaatccatatctcctcccaggtggtctgaatttctacactcccttgggagttctgggagcttcttggataggtgactggtcaaagcagtgttcaactctgttccttctcccttacttcaaatgaccaagttcatatccttgttcataaaaataagacgtttatcgcacaaaggccaggagtttcctagcaggatgaaatgcagaaaggcagcttttcaggtgatgaaagcagatatgtcagatgtggtctttgctattgctgtggcggggccctgggggagctctggtcccctgtctgtcccagccgtgggtctgctcactgctcagagtcctgtgcggatagagctgggctgggaggctgagctgttgcttagctttgagcccctctgatccaggttgttggcttcccccatccagtgctggggtgctcctgtgcctccatgggcttcccagagagtgagctggtcccaccagaggtcccagcccacactgggctgcctgcttccccctgccaccaggaagcagcctctccaagtgcctcctgtgaatgtgcagcctcctattctgccagaactttctggttgggtttgcagagttcagggagttgtgccacatacaagaaagtatttgccaagcccaatgaggcagttacgtggttgtccagaaaactgagcaaagacagtttgtcattgaagctggtccctcagcgaaaaaggcctcatcaaacaaccaagaatgtaagaaaatatatacattttccatttatttccacctgaaaaatatgaaaagaattgtaggtgtctgtgaatatacccatattgtagcaccacctacctgattaaaatatggaacctgcttattatctgtttgtgtatttcgattccctttgttggggctgttacaccgtggagatagtaaaatgtgattagagtggaatatattcatttgtagacagtttggattgcatctgagatattttcctgattgttagaatttctctcccattgggatttaaagggtggttatttttccgtatatttatcaagtggaagaataatttgacagggacatgttatcaggtaaggcatctttcctaatcgatgtgaataaaatcccatgtaagaggagctcagtgtgtttgcatatttttttaaacaataaaagattggattgttagagcatcagagaagagtgaagacagctgtgctttttatcacagggaacctaaagaaaaattcttactttaaatccttgatccgaagaggcaagttaatttaacaaaataaactcaggacatcacatttacttgagtcacagagcatgttgaaaggtgcagacatcacagggcatcaaaggatttcacagaatgctgggggtggagtctctgtctctttggccaggcgttggttttcctgcctttggggttggcagagaagccggagccaagtccctggacaggacagccctcagacactcctggttcaccttagttcactaggcacatggctcttggtggaaaagacgatttctggaaaggaagtgggagactttagacagacaaaactcatccaggattttatattgtgatttcaaattaacttggcacactaatacttcagttattaatcttctgtggcactgtaggagaaatgaggcgacagtgtcttgtaattaggggcattcttgtgcctgtcaaaggggccaagtcgggtggtgtggatgcatcctcccccagctcctgggacggctggccctgtgccctgtgccccgtgcttggccagcagaggcctggccttggctgtcacgagcacatttcataccattctctgggccgtttttattcccttagtcactgggatcctgttttgtatttaacccagtgtcttgacttgtgttgtacattcccagggtgattttaacttcaggagagggcaggccctgtctctgtgtccttgaaatgctccttttaataattttcccagcatttgaaaatgtcattactgagatttctgtttttgcctcactgaaaagaagacgaagtgaactggagtgcttcccgtgtacgagatgctttcctttgcatttgcccagatgaattcatgtaatcctgactgcagccctagtggcaggtactgccattatccccatcctgcagatgaaaatgctgaggcacggagaagttgagtatcttgtgtgaggtcacatagcattaagaggcggagcctcgatacgaacctggggagtgaggctttagagtgcaaacacttcaccgccgtgctggaccacccgtgggagttcaaggtgtgtgtaaaatgaaagcatgtagggccagttacccagaccttgatttagaaagtcaattctgtttttgacatttccagcaaccagtaaagcaaacaaataacctcctgcccccagtttattaaaaaacagctcctgttggaatggggttttgggttgggatggagccccctaggaagaccctgcgggaaatgcatcttactagcttttctcaaaggagccacacacacagctttgaggtaaccatttttcttggggtactctgaggactgggcagcatgtgggaatgcagaggctccagtgaatatcactgccttaggttccacctacaaccccagcaccagcctcacctccccagctatggggtcagagttcagtttcattttcagtaaatgtgtgattctgtgggtccatatattcacccagtttatagcaaaaaagcgtgctagaactaattggaagtgtagaagccatgatgctgcctccccaacctgtgcccctagaagtttgctcgtctcccagaggcggagctgggcctagccctggcaccccaccccataggtgctggccccacctgtcacggatcatttaagcatattttgctagcatcatgaccacactctttgctggctccagagccacagggtgagggacacaggactctgtccccacggtgctgaccacttcgtcgtcattacaagaaagtattcccaaaggcatcggtttacttgttatcttaggttgagttttaaaatctacttgaaattcctataattgcacaatttaaaaaactcttcgatctgatgtgacctgtttagtcttttctgtttagtctgaattaggaaagctcttttctccagagtgcaaaagacaaccacagactttttttttttaaaggtattatttagaaaaagctaagatggtgcttaaggccgcacacacgtaaatacagtcatgtactgcatgaagacgttgctgttgttgacaattgcatatactgtgtgataagattatatctttactgtaccttccttgtgtttagatacaaacatttaccattgtgttccagctcctaaggtgtctagtacagtccatgctgcacagctttataggctaggagcataggctgtgccacatagcctaggtatgtcttaggctatgccatctggagttatgcatgtacactctgatgttcacacaatgatgtcacccaaggactcatttttcagaatatattctccttgttaagtggtgcatgactgtgtatatatgtctgtatgtccacacacaggcacacaggtgggcttgcttccgacttccctctgacaccatcctctgccattgtgaccaggaccccattctcagcttatcagcacggactgggtgctctcttcctgccgccgtcaccgtgggtgttaagcctgcctgtgttgtgcctgtcaggactctcaggaacccctcagagcagcccgtctttggagggcggtagggattgtaaggaaggggggcacagcgggggttgcctctgctccatctcacctgcttgggtggagtctgcaccggcttgcagcccaccccgtgagcgtagtgagtggtcccgaactgcagatgtgtgctctgtgcggtgctctcggacatctaatgagcatgggaaacaaaatatgacttacagcagtgtattgacttcccaagaaccagaccttgctccctgggcccgaagggctttcctgctgcagctttgccatgtagcaggggtgcctctgaaaactccaccgccaccccagcagacaactgtgccagtctttctgtgggatctgggacacagaaaatggaagctgtctggcctggagcgtggtctcttggtcctgtcttcctcacagtgatcaccacctccagggttgcatgggaggctgctgctcagcggggtctgggaccccatgggcccagccatccacacaacaggtgtggatgaagcatgcgcattgtttccccctggggtttgtgttgtccctgggtttggctcttggtctggatgaaagagaccacgttcagagaagcggcatcccccgtcattgtgactgcatccctatggaggggcaggggtcccgtcccctctccggcagcagtttgcctatggtgagggtgcagtcatccacctgggctgcatgccgagggctggaatgcaaagcgcttgggtttgctcctgactttgcaagaccacctcccaccacgtggtgcttgccgtcagtgtgtgctttgagactctgagagacaccatcgcagaagccaagcgttacactttggttatttattgacatccatgaacagattaaaaactgttcctactttctagggtgcttctctctgtgcagttgccagggggaacgtgttcgctttgccggggcattgtgtagcagctggcatttagtctcacaactttttctttgtttaattaaaaaaaaaacctgaaaatgtttgtgaagtactcttttcatcttgtgaaatggaagctgcttctgagggaagcaggcagcctctgtcttcaccagccccttccaccctcccataggagtccctccagtggaaacccactcactccccctgaagccactctctgagagagatgcctccactgccttgctagcagaggcttccccaggctgtgacctcgctgacagtgttgtgtttcttcggggatggaaaatgctgcttctgatacccccgagatagaggaggctctggtgtgttcagaaggaggtggcgtgaggtctggccaagcttgatctggagttacctggccttggcattctgattgtcaggctccacctgacaccccccaccatctaccaggcagacaggagaggaacttacgtgttcagtcgtttgacttttttttttttttcttttttttgagacggagtctctgtcgcccaggctggagtgcaatagcgctatctcggctcactgcaacctctgcctcctgggttcaagcaattcttttgcctcaacctcccgagtagctgggattacaggcacacaccaccacgcccagctaatttttgtatttttagtagaagcggggtttcactatattggaaaggctggttttgaactcctgacctcatgatcttccctccttggcctcccaaagtgagtccatattctctgttttaaaaatttaccccctatcaatttaatgtattgtgtaataatcaaagttgaatgtaaaagcccattaaaaatagcttttaggtttgcatcattatctgcactgtctggagcttcaagcagatcttttacaagttccccaacagtgagacccacttctcaacactggtcagagttctcaagccgacagtggccagagatcatggtttaagcacatccagtggttggcataaggttggagcgatcatactttctgcacttgattgcctaatggatgcctccatgaggttggatgcaaactctgtgtggaatgttcccctggtgtttctctaacagatctgctcgtggtttatcatggaagaagtctacagaactaaaaaggagaggaaacttccaagtgctctttgatgttgtaattgtcgttgctttaaacttttcccgtgatcatatgggatgattctgtgtaggtgaatattaacaaacactgtgataagaatctttccctctattacaatcaccttgacatcctatttttttttttttgagacggagtctcactcttattgcccaggctggagtgcagtggcgtgatcttggcccactgcaacctccgcctcgcgggttcaagtgattcttctgcctcaacctcctgagtagctgggattacaggcatctgccaccacgcctggctaatttttgtacttgtagtagagatggggtttcgccatgttggccaggctggtctcaaattcctgacctcaggcgatccacccgcctcggccacccaaagtgctggggttataggcgtgagccactgcgcctggtcgacatcctatttttatagattgtttccgatgggttgtaatcttccaaaatgttgattgtgtttcctgtggaattgtataacacctgagtgaacagattgttaatgaagatgggtaaattaccacactcccattgcaactaattatattgcagcgacttggtgaaaatctttcttattgtttcatttctacagtctatgtgcatttaaaatcacctgctgatggtcttcaaaaaaatttgctaggtgttgggtgtctcccttcttttcccagtcacatgactcacacccatagaatgggatcactcataggtgttgcatagacccaggctcaaattaatcatttttaaggagtgttcaattcagaaaacatctggttaagcacttactgtatgtaaagcactgtgctctacctaatcagaaaatatgaagagtattgtgatactttgcctactagatgccaatatttttatgggggagataattctaattcattttaatagttgcgtcaggcgaggagttagcacattgtttctgtaaagggccagagagtaaatatttcaggcttcttgggccacaaagagtctaacctcctctgttgtattcggaaagtagctgtagacagcatatcaagtgattggagagagatccagagggacagattgccaatgagagtagagggtccccaacgtgctatcaaccgggtaggaggaaggatgcagtgatgccactgggatgggtgacacctaggacatgtgcttaaaaaagtggacgggaaggttgtttctgacatcaagaggaaagggagttgttgcaaatggaaagtaagtgtgcaatgccctggagaatcattaggagctccgtgaggaccctggaggggccttgcagtaccagcggaggtgctggtcagcttagtctcttgcatacctactgtgaatactatttagaagaaagtggggtgagttataaatcaatgtgtttgggtgcggccaggctgtattgttgagtgattcatcttccatcctcattctcacagcctgggaaaggggtagggtgcccctcctgagagtctgctcaggcttgacgctgcctcccacattatgtgacttgaggggcaggcatttcccaccctttcacatgaagaaagtggaattgcagcaagagcagtcccaataattggagccacttgcccatggcagtatagctgggtggtgtgacagtgaggaccagtgcgtttctccttgaggtgctgatgcgaggggaagccctgagccaggctccagcagtcacagggatcacagtcacagtcacctgttgggcaaagtccccaggttgggactgaggattcctcttctttgtggttataaaaacaataaccctttaaggtcactgagaccagcatttttgaaacctttactattattattttcaacagaagacccttctgcttaacaaaaacagttgaaagtggtgcttctcggattgacaaaaagggcctcacactccagcccctacaaaccctccccctccacctcaacccctgcagtcattttggcgaacacaatttgaaaagcattgaatttgtctacctgcaccttcactttgcaaaccgagcgacagaagtcaactttggttaattttggactcagagttcttcacggtacccaatattggttctttgagagcggttcggttctacatatggcactaactcgtccactccacaggctactgaacctctttatgattctgtctgtatctaagcagggaacctgtccctggcactgcagctcatgggatgtttggagaaatcgtggcttattggaaagtgatctgagatgcttggatacaaaaagcagaaaatgagtttttaaaaacctcttcttttgagcaggcatcattctcaaaatgtggagtatttatagcatatgttactcatagaagacattaacttcccaattattaagaggaaatgcacttttattattagaaatttaatttgtattagcctggtatacatttgtgttggatcagagtaagcctttcttatagagatttggtaatttctatgcctgtgccagcgtggtcctcatgtggaatttctgtcttgaaacggcatggaatagtctatgagataaagagagaagctggaagtaaatatacagaaggtaatgcaaataggccttccaactgcagaggaagactcttatagatgactgcatttttcaaggacttaaattttaaaatctggaaacttatttcagtccctggggcttccagtgcagccacccatggaagtcacagcagtgacagacgagttcagactttgacaaatatgaatggtcattgggatggctttgattcaccatacatttctcctgcacctgtttctgtgcactgattttatgaattttcaatttatgacattccagtgatatgccagttactatcatcatagctgtggttaaattaagggtgttttgcaagaagaagaggtattgtgatgaacctcttgtgacttggaaacctgcaagttggaaaagttgtaatacagatccatcaacagatgtcaatgtgccaagaaattacttagtgtggttcaaaggtgagtaaatagaagttaaaattatgaaggaacattcttaactcacagcagttggattttgaatcccagaggaaaggccagaggtctcacattttaagagaactggaatcagggcaaattgtctgcccttcctgggaagatcagctgagtgagtgagagagaaataggttcctgtcatttagccagcatttacatttttttcttttaaggctttattgagacagaattcacataccgtgaattcatccattcaaagtgtacaattcagtggttttagtatattcaacatataatgtgtagccatcgccacagtcaatcatagaccatttttatcacttctaaagaaactgttctccttactgtcaccccagctctgggcaactctgtgggtctccctattctgggcttttcatatgaatggaatcatacagtttgcggcctttttatatctggcttctttcattccccatgatgtttctgaagctcacccatgtggtatgtgccattcatttttttaatgctgcatagtattctgttgtatggatgcaccacatttctttctccattcatgagttgatggacatttgagttgtttctacctctacatttaatgatggtctagaaagatcagtatgtagtatacattctgaccccaaatcattatttttctcacaattaaagggagggcaattaaagggaaaagaacatttgtgcagtgcttagtgccttagaaagggtgttttctacccagcacctgatttaagtctcgtctagccccggggatgggttttctgataatctccgtttacagggtttggcaggctgcaagccttgccccaggtctcctggcagggaaaaagtgaggtcagttggaatccagctgccatgctccttctggggcaccagagtgagtgactgactgctgaaaataaacttttgaaagttttagaacagtctgttctgcctgtgtgtgtgcacagtgtgccaaatctccaggtcaggatattctgataaaaactccccaagacgctggatgcatgggcagttgctgttgatggagtcactgtctcacatgtgtccaagcccttcccagcactggttggaatccctgaaacaggcacaggcactgcccgtgcagaccacgtttcaggaacttagcatccatcagcctcatgacacaggtggattcgtaacacagatgccggtcttgtgtttcttacctgcaggggactttcgaaagcttgggctgcggtgtccccagctgtgccctgttcccctgatctgtgtgtctgctgccacccctgcttcccagtgggctgggcctcaacccctgccatccacagtcttcagctgcgctctcggctggctgatggcagctgtgttgaggctctgtagaatggagaagtcctctgacaggtgggtggtgcgcatctgaggaggaggggcatttgctccagcagcactgaagggcgaggagcacccccactttcagggcccggcgggcgggctgggtagggagggcaggcacatatgcacacacaggcactttgtatcttctgcatatacaggaagagatgggtttggtgatcagcagagcttaggtttcatcagggcaggtgctgagcttcattccctccaccctaaacactgccctgcaggccggggatgcttccaatcctgaatgctcaagctctgcccagaatgtggttgtcagggcaaccaaaattcacaggacgaaaagattgagaagcttacagtgcttgacatgccatatagagaacccttagcttgctacaaactcagtttttaaaaatgctacttggaaaagaaaaaagaaaaagaaaaaaatccaaggaagggagaaagtagaggagctggggagggaaccccaactccaggatccttttttgtggattttgagaacacacagctttttagaagtgggggaaatgaaaatggaaggggaagatggtgtttaaaaggaatcctaataccctggttctttgactgaaaagaagagcattttacacctatatttgtagctggcagatggataaaaactaataggaaaaaaaggacaatttggttctctctgaagtaataagctcattggagatggggctaggagagtgataggactaggactaggactaggactgcctacactaggactgcagtccatgggaacagggagctaacaggagggtcccatagctagggtcatgtggcaggcagttcctgggaggaaggaggggtgacagccaggacaaggggcaagtgaggagctgctgccaagcttccctgccctctgggaccaggcaggccctggcctgcggacaccagcgtctgccactcatgcctgagtgtcaactgtcgagtgtccccaccccttcttggccttgccacataaagagctgtaggctttattttggaaacctacgttctttagaggcctgcttaattaagtttcccatttgcacctaaccctcgcatgcttgatgggcttcccttgctggagctatttttgcatcgttttctggaaggatgcctctttccccgcaggcagcctctgaccgtgtgccagagagctccgcgtttgcatcttatttttctgagcacttgctatttttattttttttggtactcatttgacctggacttctgataaggcgtttaaaaatagcctttggacttcctgtgggtaattgggcttctcagaatctcccctctacttttaaatacctgctgatttgtgtcgcctgatcccggcatggagtctggctatgcgtttggaaggtctctcgaatttcccttccacctctcagggttgcattatctcattactgactgagcacctcgccctgcagcgagaagggccaggtaccttgcgggccttctggagacaccaccagaaactcccatttgcagtagcaaatctgtacgcacacctgtttttccaaagtgggaatccaggtgatgtcgaagggctccagagggaacgcagaccacctggctctaagcctcctttaatgggacgagggacagaagccggcaggcacacgtcccactcagggtcacatggctggttggccatggcagagctgcagcctggaggccttgtccacccttgaggccatgtcggggtgtttgggacggcagagactgcccaccctcctgcatccgctgctctcctgggcccctgggctgctccaggccagcagccctggattggtgtagctcccctggccccaaggcctggcgttgggctgtggcttgcaggcctggctcggtcctaccactggtccttctatcatttaatcccgtggcgggcagcctcctgctgtggcatggcttccacagcccttcctccatcctgggcagccctgcaagggaggacacaggtgactcccttccagtctgtttctagagtgtctgggaccagctacttagcacctgtgctgagaggtccgtgggtttgtcgtcctgcaagagtggccctacatcatgtggctggatgtggagttggccttgaaactccgagtgctgctgcgctgtggttgcggctgtacctggcctggctggctgaggtctggttgcagtgaggggctggctctgtgaatcctgagctggtgtgtgcctcctcccggaggagggagctgcaccacatgccccgtggccttctgggcctacttgtggccaaatgagatcaggcgccaatagcatacggtctgactgctgactctttggggcacaactcacagggagatcctgccaagagacagaggtgggcctagatggacttcctttgaggaccccggcacatcatagaggctggcactacttgctgagtagtgcgaaggcttcccctacacagtgcgcccctgtgctgggcactgggaacaggtgcttagtttgatttcccttagccctcaccatagccctgtgagtgggtgccactgttttcccttttctgcagatgagtacactgaggcacagagaggtggaagaactggcccaaggcaacacagctagtagaggcagaggttgggtttgaacctgtgcagatggctcctgagctcctgctgcagccctgcggcccaggaaggcggtagtcttgttgcccttcctgccaactcactgcagaatctcagggaccaggtcagggggctgccagggtaattcgttggtcgttagggatgctgggatgcacttggcctcattctgggagggctgctgttctgcctgacacaggaggggttaagaagggaagggaagggccagacccacttggacttcagtctttcctctgccacttgcaagctgtttgtcctcgggctggtggcttaatttctcttatcttgtttcttcatcagtaaatgggggtgaggctctccccaaccccagcaaatgagaccctatttgtgaaggctactcaggagtcagatgcccatattcccacagccacccttgatgcaggtggccggggaggggtgggaggcccttttagggggacctgtgcttggggtttaatgctctgcagttgctgttttgagattcttggatatttacctttgcatttgtgttttgtgagatgtgttgggacagtaagcctgccagggcccagtagggccgggtgtgtgccttgctggagtagaagggtggccctggcccctatcaggctctgcactggccctgcctgaggaagcctggcatgaaatagcaaattaaaaaaatgctatggtgggttggggaggaactccaggagaaaggaaaaagccttacttttgctttttgcacagaagactgcacttgccttttgcatcaaatcccacagagtatgtagctggccccttgggcagccttggttatttggcatctgggtgaggcccaggaggtcagaggggttgaggtttttcacagagttgacctgtagttaagtaagcggcaggtttccagcagagttgtggctaagcccagtccccatgcagtgtgtcagttgggggtgctcgggagtgtggagcctgctgtgacatttgaagtctctcagtaccctaagcagaacacttagaagtcctgcccagtgcagggatggccacagcagggaccttctggaaccctcaagacatggcctgcataggttgtaaatcgaagcaaaccagccagccagcctgtgatctaagccctgtgagatcacagctgcagtgtcatctctaaatgacaggaatttatgaccctgaggaataaattatcaacagtgcaagacaggatcacttcaaacatccttgtgacaacttaaacaaaactcagtgagcaaggggtgtgtgcgagaggtagaggggcacagtgggctacctcttgggtaccctgcccagcacagattggaggatgatagctgtctgagtttctcaggctgctataacaaaataccacacactgtgtggcttaaacagcagacatcgatttctgtgagatgtttgtttctcatagtcctggaggtgggaagttcaaggtcaagcttccagcaggtctcattcccagtgagggctgtctccctggtttgtagacagccagtgtcttgctcctcacatggtggagacagagaacatttttcgtgtctcttaaaaggggactaatcccattcgtgaaggttccaccctcatgacctaatcaccttcccaaaggcctcacctcctgataccaaacctaggaagtacagcctttgacatacctaggctacgtggcacagcctgtgttccccggctgcagacctgtgcaggatgtgactatactgaacaccgtaggcagttgagacatagtggcaaatgtttgcgtagctaaatgcagaaaaggtacagtaaaaatacagtcttatgggaccccatggtatatgcagtcatcatggactgcaggtcttcacgtggtgtgtgactgtatttacatggtggccttaagcaccgtcttgagtttttctacacagttccacttaaaaaatggtcttgggggtccaggcatggtggttcatgcctgtaatcccagcactttgggaggctgaggcgggtggatcacaaggtcaggagatcgagaccatcctggctaacacggtgaaaccctgtctgtacgaaaaatacaaaaaattagccaggcgtggtggcgggtgcctgtagtcccagctacgggaggtgcttgcagtgagccgagatcatgccactgcactccagcctgggtgacagagtgagactccatctcaaaaagtaaaatggaatggaatggaatggaatggaatggaatggaatggaatggaatggaatggaatggaatggaatggaatggaatggaatggaatggaatggaatggaatggaatggaatggaatggaatggaatggaatggaatggaatggaatggaatggaatggaatggatggaatggaatgggatggaatggaatggaatggaatggaatggaatggaatggaatggaatggaatggaatggaatggaatggaatggaatggaatggaatggaatggaatggaatggaatggaatggaatggaatggaatggaatggaatggaatggaatggaatggaatggaatggaatggaatggaatggaatggaatggaatggaatggaatggaatggaatggaatggaatggaatggaatggaatggaatggaatggaatggaatggaatggaatggaatggaatggaatggaatggaatggaatggaatggaatggaatggaatggaatggaatggaatggaatggaaataacaaaattgtcttggggattagggcttagatgtagaaagcttaagtgtacacaaccttcagtctatagcacccgctgtacagcacgtgtccccagggacgtttgcagtgtctggggacagttttggttgtcacagctaaggtggggtgggtgctgctgagcatgctgtgatgcatgggacagccccccacagagaaatgtcaccagtggccagggtaagaaaccagcattttccttccaagccctagtgatgtggaggaaatgttacggacatgctccacatgctcctaaggtgactttgttggtatggaatatttctagtttacaagagaacagaataagaaactccagaacaccccatctgcagagtcgccagaggggccctatcctgcacctgtagttggggctttcagcaaggtgttctcagtgggcgtctgtttgctcagaggccttcccagaccctgccgcagaactcactagcagcctcctttccataggctccttcgtggggttgcctgtggttttctgtcatctgccttgtctttctctctttccctccatctctgatggcttctgtgtcctgtgtggtccctgggtatggctgtgaccttcatttcctttgtagtcccctgtgtcctgctcagtcggcgggtccaagcctccgactctgccctgtgtgcagagcctccaggctcccggcctccagccttgctcttctaggcaccgccgaccttttccacctggagatgccacagcctcttaaagtgagcttgtcccagcagcctgccccacccctacctggccaagctggaggcctcttttctcctggtgtccctgcactccggttggttcacctgctcacaggctctatttcttgctgcccctcctcacccctcatgcccactccatgaccaggtcctttagggccggctgagcacagaagaaaaacacagggccctgagttcacaggacaagagaaaagcttttcccctaagtgcggcctctcagcctgtcatggggtttcctatgtgctgtttcatgtcactcctccttgggccctgggtgctgttgggatagtgcagacctcgcagtggcccggggcccacccacactggcacccgggctgctgctggggacaaaggggcagcagcagcagctaagtggctgtggggacctgggtgggaccctgtgagctggagctccaggctgaagcagccgtgctcagggactctcagttctctcccctgtccctcagcacagaccttattttatatcaggtacggctctggcttcacacgtcttccttccggcggcctctgcatggctgcaagatgcacggtcctgaaatgatgctttagttttgcctcttctgcacttaaaaactcattttgcaaagtgaaaattttgctggccttgtatttgaagcctttcacagacagaccccagccccactctcccacaggcctccctgatctgtgacctagaacccacaggtacatggcctgggctttgggccttggccccttgcctgtgtgcaggctgtttcccggatctctctgtctccaggcacacatccaggtatctcagccgccacaggccagcagtcccacctctctctctcttatctctctctccccctggctaccccaggccacccttgctgtctcctgctagggtctcccctccctggtttggaagttgctctcctcctctttcagttttgaggtctctgaaagtgtgatctgggaccatgccgggcctctcacagcatggccttcgtttgggacgtttgtgtcaggaggcaagtgtctgcccacttctccagcccgtcagcagcatgggaaacgctgcgccttgcatggagagccacgtacagcccaggggcacagccaagcggtgaaaggagcattggtaggaaatgagctttgggaagtgggtataaatgctgctcagctgatctcttgggttatttaaatggggcatagtgccctccctccagggagaattatgtcctgtgttgctaagcctcctaccaatgagtctgacacatctgaaatcaatacaaggacccgtggcatcataaaaaaactggtggagaagcaaatgttttaattaaagtaacctgtaatatgtccaaaggaaacgggacacaggcacagaacctaggccacattgtatttgccttggagcctggctgggtctcgtgacagcacagctggcaggaggcacacagcctcccctcgaggcgatctcggccactttctcatcttgacagatcagcatatggacgcacttacagcttgtagatgaacacggggaagaaaacaacccttctcttccctcccttgtttcccaagccacctgtggactgcagagtgaggatgcggcccccaccttgcctccagtgctgcctcccaggtccatctcggcagcgtctggaccccctcggaggggagcgatggataatgaaactccctaggagtgtgtctcggctgctttgggctttccactctctgtttgagattttgtgaagggacacctaattgcccgaacttaattgtactttttagtacaattactaaatgtagtacaattacaattacacagtactttttctctttgtccctggggcgcgttcttgttcctcacatgtctgggtagctggtgggtggtcagcatggctgctttctccttcccctcccagcagtcagcagtgattattctttaaaaattgagaattcctttttcagagcatagagggtgaggcgtcagcccggccccaggaacctgggtcctgggaaaacagccagcacacagccttgggtgagcaccttctctccctgagcctcagtttccccatctggaaacgccacggccttcccgtggggctgtcgacagcccttcccatactatggagctcttaggatcatacacacatttaagcaaagggggtcgagagccccattcccgggaaagggcccaactttaagtgttgcagaatttatggactgaacaactgcttggctgattagcacagttttgtcccgatagtaatgttttagagtgtaggtgtcatggaaggaatgcaaacacaatgggagctggtcttgtgcctgaggataacacttgtgcctaacaaggtaacacttgggcctgaggatactggcctggccatggtcctacagtgattggaggggaagaggctccaaaggctacagaagctccgtcgagcctggaacactggtggccctgcacggtgccctgggcctgtccgtgtcctcagcagtcaaggagcactgtccactcattgagtgacatcctcattgaggatgccttgcccgcaagaaggaccctgcagagagccaggagcctcttcagagagccccagggcagcatcaggatgaggcaggctgtgtggctgtaattaagaggctacaggtggctctctcaggtggacgcagcagacagtggcgcagatgcggcggagcttgctagtccttatgctgccctgttgtgagacggatggccttgggagggtgtttccgcgtccctacgagcgcatcacctgtggtcaggcgatcactgtatccctggccatgacatattctttaagtcgcttcttagttcctaagtcccaccgctccccattgcctcctgaatgcagttgctctgatcccagggcatgcatttggagccctctgggactgctccatgtggttcgtccagctctctggaacactgttctccactttccctttgcacgacaagcatcgtggccctgtctctgtgcaccccatgtgagtgtcctggccctgtgtctctgtgcaccctgcacttccaccccctgggcctggagccccatcttctctccatgggtatgctctgcccagcccacagaacccacatacctttcacaccctcggtccatccattcctgccctttgtctcatgcacgcctcgactctgaagcgtttgctctcttgtgtgggtgcctcgctacctacccctgggcccttcttgttccctgtgcggcctggcagcccttgatggcagggctgatgtgtgtgctgttgtggccccaaggcctcccagcagagcatctgcacggtgctccagtgtgaagcatttgtgggcttgaaggggctctgagtgtgaaaacccgagtagtttatatctttgagacgtcaggaggccattcgaaaaatgcctggatttgcacctcctgcccactggctgtcatgaacagtctcagacaaggcgaagagggtaaggagaatccagtgaaggtctgtctcttctccatttagattcagccattaactctgccacatctgctctttccttttatctgtctgtatgtctgtctgtctgtcttgggtgaaccatgaaacttactttgcttatgccctgttgcttcattcctagataatttagcagacacctctgcagaataagggcactcttctgtgatcctgttatctcacctaagagagttagcaggaatctccttatcttatcttttaaatcattatcaataccagttcacattcaggttttcctgattgtcccttaaaaatctgctgtagtttttgttaaaactgggttcacttgtggcttttgttatgcccctccaatctcccttattctagactagtttctcaacattgtacatatatttgtgtgcaatgtacaatgtacacataaatgggtgtgttcagcagcgtccctggcctccatcctccaggtgccggcagcgccacctactccaccaccaggtgtgacaacccacacattgccagggacctgctggcaggcaggatgccccattggagaactgttctagcagtctcttactttgcttttgaaggtattgaccctttgaagagaccaagccaattattttgtcaaatgtcctgcattctagatttattgggtcatttcttgatggtgccattgaacttgtttcttgattccctgtattttctgtagcgtggaagtgggggctaaactaaaggcttttttgtgttccagggaaataattttagaagtctgccttttaaagtagagcaactgggtgggcatggtggctcatgcctgtaatccttgtgctccaggaggctgaggcaggaggatcacttgaagccaggaggttgagaccggcctggtcaacatagtgataccctgtctctacaaaactaaaaatattaactgggcatagaagtacatgcctgtagtctcagctacttgggaggccgaggtaggaggatgccttgaatacaagagattgaggctacaatgagccatgtttatgccgctgcactccagcctgggcagcagagtgaaactccgtctctaaaaataaataaataataaaataagataaaaaaaattagagcaacttatgtgacttttttttttttttttttaaactgagtcttgccatgtcgtccaggctggagtgcagtggctcaatctcagctcaagagattctcctgccgcagccttctgagtagctgggactacaggcatgcatcaccatgcctagataattttttgtttttgttttttgtatttttagtagagacagggtttcaccatgttggccaggctggtcttgaactcctgacctcaagtgatccacctgcatccacctcccaaagtgctgggattacaggtgaaccactgtgccccgcccaacttatgtgactctttatgctcacacagaaactacattctaggggtgcagagggtatattcatcagatgggagaaggccacggtgagaatcacatggctcagtctgttggtgtcagggtctgcaccgtatctgccctagatctctgggcagaggtgttgtttcggggcagtgcactttgctcactggcaggaaggcagccccgctctgtgcagccttccccagcagcctccctgaagcagcggggggatcagagacagggaagcacactgtgtgtgtaaaatactcttgagcctaaagttggagttttctcctttccgcttcctgttttttcatagaaaccaactgaagggttatgaattatttgttgacttaaaaaagtagatgtgtgtttttctgagctctttgtaacattgagatttaccatgtttactccaaaagtgtttcaaggccaagtagtagttggagactaacctggtgaactgtcacttgtaccctgagatgcctttccagcctccgcggtgggcattgtatgacctgcacgtgaatggatgggtgacccaagccacccctctctccctggaggttttgcttggtgtagaatgttattctggggacacagcactatatttttaactatggtcgagattagaggaggctgggccgggcacggtggctcacgcctgtaatcccagcactttgggaggctgaagtgggcagatcatgaggtcaggagattgagaccatcctggctaacatggtgaaaccctgtctctactaaaaaataccaaaaatttgccgggcttggtggagggcacctgtagtcccagctactcaggaggctgaggcaggagagtggcgtgaacctgggaggcagagcatgcagttaaccaacatcgtgccaccgcactccagcctgggcgacagagtgagactccgtctcaaaaaaaaaaaaaaaaaaaaaaaaagaattagaggaggctgagtgtggtggctcacacctataatcccagcagtttgggaggtcaaggagggaggatagcttgaggctggagttcaagaccagcctgggaaacataagtaagaccctgtctctacaaaaaaaaaattttttttaaattagctgggcatattagtgtatgcttataattccagctactcaggagactgaggtcaaagaattgcttaagcccaggagttcaaggttacagtgagctatgattgtgccactgcactccagcctgggtgacaagagagagacactattagttacttaactctggcatttgctatttctgcactaattgtcaaagttgactgagcattctcagtgccccttctgcccagtcatgggccataagcttgtgtttgggatagcatgtctctgtgtcatgtgtggcttgttatggttgcctggaatgaacttcaacacacctctgtttggctgagcgctgcatttgcaggaggtgagaaccactcagggcctgaggcagaacctgaccatgctcatttggaggagagggcctggggagcttagtgcgctcaagaagaaggcagatagggctgtgtgtgctgtagaggatgataaactgggggtgagggtgcaatgacgacacagtgccacattttagaactatgctctcatcttgtgcaaacaggtctgtttacagcagttcatttttatgagttacaattattatttctggataattttggtgtatggtaatcattagagtaagctgtgtgtctgattaaagaatttgtctctaatttatgccaatttaaagatgtcttctgtgttctctttgtctctgggggagggaagcaggttgctatggagacaacataagaaaaagtgacaggcaagaaggcttggcagtttcgattttgaaaatatttgtgatgtaggtaattatatatgtaataatgttatgcagcagaaccatctgcctttggagagatgcatgtcatggaatttcatggtaaaacagtgtttctcttaggaacaaaatgttatttgtgtgctattaagatattgaaattgtggaaaataaagatgcaatggagccctaagattgtttccaggggtgcagttgctgtatgatgtaaggtgccacctatagaatttggaaagctattttcacatggaaacaaaacatttgtataggaagacttacctgagactgaattattttatgttgtaaattgctaaaatcaactgtattcaggtttataactgattttgatcagtttaaatggcacaattttcttttttaaaaaaaattaaactatacctcatattgtttggggaccaatttaacaaattggcctatggcagtttccctgtatcatcattttcccagggatcttggcttagttttgctctaatctggaattccttcttttactcttacacagttgagcattccccctcccccatttttaaattctggtgagatttaaaagaagaagaaactttagcatgcgatttgttaaattcaacaattctgcaaatatttacggaatgcctgtgctgggcacagtgctgggccctcagacacacatgctgctgcccccatgggctcagagtctgagcttaagctctgctgagacagcatgcaactgccctgtggcacctacctggctctgctggcagagcaaagctgaggttttagttcacatcttcatgtgatggattcgatatggttgcagaattgcagatccacagacactcctgccacctgcaggtggggcatatcccttcccttaaacctgggctccatggctgctttgaccaatcaaatacagcagaagtttcccatgctcggtcttcagggatgggcagcttatgcttcctgtatcttggaacacttgctgtctaggagcccagccatcatgtgaggaagcccaagaagccctgtggagaagggcaaaggctcccagtaacagttacagctaagctccatgtgattgagctttcttggaagtggagccaccagcaccaaccgacccacctgcagcagagctgttcccaccaagctctgttcaagttgcatatttgtaagcagtcatttgactttactgttttaatacactaagtttggagcaagtttgttatgtaacaatagataaccagaatactgttttttctgtaatcctgtactgttgctgtgggaatatgccagtgtctaatttccttgtcagaggaagtgaggtcaagggaatcttgccctagaaatacatgtgttgagcagatgtctcaagcatgagatacttaagcatctccaggaaaaggcaaattcaggttcattctctcttactggcctgctagagaagatccttaaagagggccagtgtgggcatctggagaaggactgtaggatccaggccatcagacagaggtgtctttggccatgggcaggtggggttcatgttcacagaggcccgacatcaacacggacatatggacccagagtggcagtgctggccccagcacctgtagacccacaccaactttccgtggcagccagtaccttaaacaaaacccacaaatgttgcccaactttttctactgttgccactgggaagtgggtccaaaccctctgtgctgtggtctgcctgggcatcatagttgtgtacctgaggctggtggtctcatatgccgtggcatcaacacctgtttatgggctgtaggaaaactgagaggtcatcacattcagagattcccttgtgccaggtcctgcgcgggtgattttggtgaccatgactgagttttcttggctccagtggtgtgctggcaaacgtttaacagttggcttcctaggaagatgccctgagtgatagtgtttgtccatttccagggtgtaaacactcccacctggccgattccaagctgcttatgtgatgccatgggttgggagagctgcaaacactcctgagctgggagagcaggcctgggtacagcaagggaggcgagaactgtgcagtgtgttatctgaggaaagttcctagctctcatggggaagattttccttccttttgagtttcctatccactccctgctgtgtaggtggggaggaaagggagaaacgctgtgaatcagtcgactgctcctctggcaagcaggacccatttctaaagcatgagtcactacaaaatgtagctttttagatggaaaaatctatttacaaaccctaggtgagagtaaatggtttgttcacctcctgtgcttacttggtagaatgacaaattggacactccagtattccaagatttattattgtgacaaaacatatattacataaattttaccatttttaagtctacagttcagtggcattaagtacgtcccccctgttttgtaaccactgccactatttctgagcaacacctttccaaactgtgtccccattaaacacgaactcctccacgctcagcccccccagtaacctctgttatactttctgtctctgtgaatgactattctagggaccgcagagtcaaacagtatttgtccttttgtgtctggcttatttcatttagcacagggtcctcaggattcatcgacatagccgcatgcgtcacaatctccttcctccttcatgctgaataatattccattgtatggctagaccacattttgtgtattcattcatctgttcacagacatttgggtgtttctgccttttggctgttgggaataatgtcactatgcgtgtaggtgtacaaacatctgtttgagtccttgctttgagtttttttgagtatagacctaaaaatgatatttcaagatttttaatgtcactgatctgtgaagtccaaagcgggaaagcctggtcttttccgtgctccctcgttttgtctgtaggcattgagcacagtgaggctacatgttgttttcagagttgcccagcagcctggagactgctggagctgcatcccagggagacagtggctggagtaacaccaaccagacaatgagatgggacatctggggctttcaagagctcagggcaaatggcctaagcaggtggctctgcaggtgtggattgtgtccagctcagggaagtgcctgggcctggtggggcctggagtaaggggagaggtggggtctgatgagcttactccaggtgggaggcccaggaaggaggttgggttttcctcccggggttctctctgggtgtaggcagggaggaaagggagaaatgctgtgaattagtcgactgcttctctggcaagcacgacctatttctaaagcatgagtcactacaaaatgtagctttttaaatttaaaaatctatttacaacctaggtgagaaatctttattttaattgtgaaggaaaacacaaccccacttgacacgtggtggaattgctgctgtcctttcctgtcagagcctcccagtgggctgggtttggggatggatggggtgcacacccgctctgctcagttccttcttcctcctggcacacgggttgatgacagctcttcagttgagtctgttctgctctgtctggtagggagcacacctttttggttaatatgcccatttatgtgtgtctatggggcctctggagaaaacgttacttgcagaattaagcacaattaaaggagaagtgagccctgctgacctgaaagcaggtgggggctgctccttggctgggataaaaggcaaggaggcaaccctgataaatggcagctggctaggtggtgaggggatgtcctgccatttgcagcaaggcattggttacaagcctggattttgtttaacatctttattaataatgctggaggcaacagtaaacagcaatttaatgaaattcacagaagatgctaaatcaggaggtgttataaacagcagggaagccctggcgaggtaagaagcatggagcggaaggagtaggggccgtgtctgagaagaatgcagatgggcgcaactgcggtggagggggagcccagtcttccaggtatccagtaggagcggatcagcaagctccggggctgtcacagagcaggcagctacgtgctggagagcacagcagtggggagcattagacagacagatgcacatgagcccttcggcccttcctgcatttctttcttttttttttttttgagatggagtctcgctctgtcacccagggtggagtgcaatggtgcaatcttggctcacttcaacctccgcctgctgggtttaagcagttctcctgcctcagcctccctgagtagctgggattacaggcattcaccatgcccagctattttttgtatttttaggagagacagggtttccccatgttggccaggctggtttcaaactctggaccacaggtgatccgccctcctcggcctcccaaagtgctgggattacaggtgtgagacaccgcacccagccccttcccacatttctgttacctctttctagaaacctgaatgtgaatgccactgaattcaataaatgactgattgagcacctgcattggtgtaactggtgggctttgcggaattccagggagatagcgaaacttggaatgtaagctggtgaatgggtggttggtgcggcttgccgggcaatggtccgaatcgagcctctgggtggctgtggttttgtttggcttctggatgacttgtcagggtaccagccactggtgtctgatctgggattttcttcctcctcttcttgactcctcacttccctccaactccatgaaatgaggctgcccagaaaaggctgaaggaagtcagttggctcgctatggaggaggggcagttttcaattagagtctgaccatgttgtcgggaaagtaggggactgctttggctggttatacgtgactataaatcccaacttggacagtatttcatttagaatcctgacaaggaaaaacaatacaaaagtctcaaaatgaatttgttagcaaccatcctgactgcattgtgaggctttccgacagctccagggaggttggcttgaggtagctttgcccagctggctggagaaatgagatcaagtggagtggcttgaggagaagtcggctgacccacacatttgacagatcttttgggttcattgatctttgtcaatgtttcttctccagatagcaacctcccttttcttgtgttaaatggactcacctgattgtaatcacagaactaattgttgtataataaagacccattctctctttgcccgtggcccaaagcagccttctcccccacccgtcagttccctctgcccctggtatttccctgctggaggagttagacctcctggtgagctggtgtggggtaggtgccataccaggctgggcactggaagaacaagggtggatcagacacagtcttggctttatggaacttctgttgggtgggggagaaagatgattggaatatagtggatgatgaaaagacagatgctgcccacacatcccagggaagccctgtgctgagcggtgtgcaggtgtcggcagcagggtaggagtgcactctgagcaggtggaggatgcagtcctgggaaggctcggaggaatctgaaagcacagtcaagcagttgcatcactttgggtgctctgggctgcaagtcatgaacacccagtttttaaactgggtttaaaccacatgggcgcggttgcttattctcttccttggcaagaactctggaagtaggtggtcccagggctgcttctgagctcagtgatgtactcaggacatggctcttcctccctctttgcccttccacaccctggtgtgtccatagcataaggctatgtgtacgccaaacgcagcccgggcatcttgtcctccagtgataactgctgggtgacaggagggacggaccagggctcctcaaacctccctcattttattagggaagaaagtgttcccagaagcatccaggacacttccccttatatctcactggtgaggacgtggccccaggatctgcagggagcctggagaagggcatatctgccatctgaagcctctatcacctaacagggggctgggctcttaaagcaaggaagatgggggcattgggtggacaccagctgtgtccaacacagcaggcacctttgagccatgtcagggcagcaaactgtgtgtctacacaggcatactaaggtcaggtcaagatggcttcatctgtcacgtgtcagagcctggcctttatcctttaccttgagtggggaacgtggggatggttttaaataggaacgtgacgtggtctcactgtggtgtggtgtgatagggtgtggtgtggtgtggtggatgggctggaagggcagggttacagcccgtgggtcgttctgaggtcactgaagtaacccaagcccatgaggcaaagcctcccgggacactggtgtcagagtgtggaggaagctgactcagtgactgccctcagaggcctggagcagtccctgcaaaagacctgtggattgggtggacgtggcgggcaggggagggaggagctctgagaccagccctgcagttctggttggaggaaatggagggcaggcagtggtcactggacggcgaggaggaaggggtgtttctgccaattgtcttgggtgtgccgggtgcccccatgctgcgtctaggtaggggcctcagcaggctgttggaggtgaggctaagacgcagactggaagtgactggaaataaagctgtcagcatgtggtttatgggtaaaaccacaagagataagatcacccaaagggagtggccccaaaagctggggcagaagggcttgccttattctcctgggagcattgctaccctggcagaggaggggccttggggctgtgggggcagcaggaggccggggccacgtgtgctgtgtagagagttcttgtgtaacaaacctgcacactgtgtacatgtaccctagaacttaaagtattaaaaaaaaagagtcatagaaaagagaaaaaaaaaaaaaggagtggagcccaagccagccaggccctggcgtagaagacctgtgagacaaggactaagaaatttcattgacatgaaacaaaagggggatgattgaaagacagccaaacaggaatcctttttgaggaggacatctgaacagccctggaagaacgtctctgcctgacactcttgctggcatctgtgggctctctctgtcccgtggacaggacaatcagaagatgggctccactccagctgcaactctggtgacatttagctgtgtggccttgagcctgtggcttcacccctctggacttgcgtcctcacccctaaaggggagcaagatctatgtatattggagactgagttccaagggctgctgggggtgacgcggacagcagtgttttgggagatctgagacttggagggtggtaggcactgacaccacagcccaggagctctgcaccagctgtagtgagctgaggagagaaggggcacgtcgctgagctcacacatcttggtggaggcagagtaagatctcaaataatctgagaaaacagcttttgtacttctaaccagtaaagctgtccatggaaaaaatgagcagcgttaaaccttcagtgggacgactaacctccatacacatcacaattgaccgtgttaagcatctacgtgtctttctgtgtttctctctctctgagcattgctcaattatggaataagaagtctgtaacctcccctcatggtccctgcccccttactaatgtcacgggcagaggaaactggagggtaggggagaaggccactttgggtcatgggtaaagagagaataagtcttcattatacaattgttttgtgattaaaatcaggagagttgatttaacaccagagaagggagggtgcattctggagaaggtacgttgataaagatcagtgaactcagatgctttgtaaaatactcaagctagctgacccctcctcaagccactttacaccatcagaacaggggtgggaggtagccgggccctgatttcagcagtgtgtactcggagtgcactcctgcttctatgtgggttcctctcgggagagcccctgtctgatgtagttttttgcctgtgatgagtgcctctctgggtagagttcttcctcggtgactctggatgccaggaagggtgctgggctctcacctacgattttactgagaagctgctgcttctggaatcctacacccagaccgtgtgactcaccctgtgaactgccactgctaggacatctaatgggggacatcgctgcacagttgtacatctaaggatggagggatgagctgggatttgccctgtgttcaggttgcacgagtttgttccttttctttcttctgacatggaagcagatgttaggagtcccgaggaaccggcatacagagtggggtccacacagagctgcgaatgtggaactgggcttctaccgtgccagcggccacgtgagctgggtgcccatgtcccatggcttgttaacttccaagtctagaattttcccatggccatgactgcacccattcatgggggagctggggcaggaacaggtaagacagccaagcagtcagtctgaagaacggagcctgtcagctgctggaggaggaacccgggggacatcgtgaggtctggttcccagctcagcatcggtggggagtgagtcgggagagagagtgaactgggatccactaggcacctgcccatcattgcatctactgttgcctccctgcctgcttccaggtcctaactactttctctctggccagctctagccctgacttaaagggaaggggattaaaggaaatagcattctcagcttagtgatcccaccttgaggacagtgtttccacacctcacagcatatcatttatttagctccaaaaccaccctctgtgttaaaacggtgagatccactttgcagaggaggaacctgagtccaggggagttggtcacttgagggcggtgcagggcttatccatggagaagtggcagtgcacgcccacctggccgcaaagcttaagtgccttgcttctgtgatacagaaagtcagcagagaacacacagcccgaagcctgaggtggggcagagcgtttcctgaaggtgagatggccagccatgctctgtaggctgatgggtgcccaccctgcatgctcactggaacctcctgccctctctagccagtgcccaaggcagggtgaaactgtggggtcacatgcttgtctgatcatttgctaggacctgatttaaattggcatacaaatatatttttttaaattgtggcaaaatatacataacataaaaatttaccattttagccatttgtaagcaaacagttcagtggcattaagcacattctcattgttgtgaaaccatcaccaccatccatcttcagaactcttttcgtcttcccaaaccgaaattctgtccccataaacacttaactccccattcctccaccctccaggccctggcacccactcttctactttgtttctttgaatttggctggatttaagtggaattacacagtatttatccttttgtgttggcttatttcactcagcacagtgtcctctaggctcattcatgctgcagtgtgtgtcagatctccttcctctttaaggctaaatcctattccatcgtacggtcatccacatcttgtttattcattcgtctgctcatggacacttggggttgttttctgtagacaatattctgggagcaatcactcttttaataaaattctgtcttccattgaaccttttgggtatcttttattatggtttttcaaatacagagtccttggagaaccttggttgttctctttgtagatacgtatttggaactgcacttaccatatcgtgaatgaggctacaggtcaaattcccatctgaacatcaccctgatcttgaccttagtctgctcaccagatggtttgtctcagctccaggtttatggccacgattggtaaatagactcactccacatcttagtaataggaagaagtcatcccgggcttccccagacttcaagtatctttagaatgttgagcttccggcagatttttctctaccaggacctaccacatcctgcatgtgttataaacagaatcagtccaccagaatgagaacaacctgccagtgatgggaatgagatgaggaagctctctcaccggctagaagaccagatgtccgaagacctttttgggggagggtggggtgttgcctaacaccaaataactatggccactcaactaatagatcattcttctcccgcctgcatctgattgctggcctggctgtggtgctgggcaggctggacaccaccagcttcccccaggcaggggagcccccatctcccccatacaggggatctctgttgtggcctggcacaagggagctggcccggctgtgggtggccttgcaagacagctcagccaggacctttccctcgagggctctgccttgctcctgccggttgccttcccacaggtgtgcggactcgagtttgcttggatggaaccaggtgccacaagtgaagcaagtggcagacagctgcggggaggggtgctgtgttgtggtaagagtagtcaatagaggtttttggaaactgagtagagacagaaaaccattgtcctctccttttctgttctattaaaaaaaaaaaatcctgcctggcctcaccagtttctgaggcacgtgacaaaatttagttttcatcagggtccttcatgtggcatggcacaaaaaaagacatttcagtatttatttgaaactttcttggctctcttgcccccgtttttgtggcttagaggaaggtgtggatttcttctacttcaccagaattgtcctttcaattcaaaatatgggcttctgagttgctggatgaaatgttctagaaacagtctttgagtgaaaatgttatgcttaacaaaacgagcttcagtttccacttcctttctgctatacaaacctatgtggtgctgcttattaggcagaaatagaagagcagatggaagggtgtgtggtacggatgccttctgaccacaaaatcaaacaatagaccttttcatctctcggtcaaaatacagcctcatcacctctcctctcagccaaaaagcaacacagaaatgcacagtttgggcataggagcaggccctgccggccagcaggagtgagggagggtggtgttttcttgccctttcatcatggctggactttggcactttgttctctaagtgaaaacaaaaatagccactgacttgggctctgactatatttgctgtttctttaatgcttctcttccttgctaaaaatacattagaggtgattaatcaaacacacacacaaacacacaaacccacaatcaatgcaattaaaaatatataggtggagaaagacaagaaccaggtgagagccctgccttccctgcacggaccaggcttgtagaggggtgtgtctctcttcctcactgtttctgttctgggattatgcctgttatgggcactgacctctctttcttggctgcagtgccatttgggggctcagtcctcatttagctgaccttaatttggatggttcccaactttccatcaactggcattgcacatgactggctttgtggagttccacctctctcgctcacaccccattcacaatgaggatagaggggctaccgcctggagcatgggaggatcctgaacttgggagcttccatgagagaatgtatttgagttgttctcagactaccgtttttgctcagcacttttttggggggctcagtattatttccaaaacattttgtgtaattacataaggtttctacttctttaatttgccaagtaaaatgttaaaaaattttcaccatcacttaataaaacaaggaacattttagtattgcaaaaggaggaagaacagccatttttatccgacatagaattggaagctctagacagagaaattagggaaggaaaataaattattggcttccaaattggaaaaaaaaaagtaaaattatctctgtttgcagatgatacgatcttatgcatagaaaactctaaggagttctcagagttttcagagctagtaaatgaattcggcaaagttgcaaaatataaaattaaagctcacagttcagttgtatttctatagacttgaacaatccgaaaaggaaataaaaaattcaatttgcaatctcatcaaaaagaataaaatacttgggaataaacttgaccaaagaggtgaaagattggcacactgaaaactacaacatgtttttgatacaaataagtggaaatgcatctcttgttcatggattggaagacttaatattgttgagatgacactactactcaaagtgatctacagattcagggcaatctctatcaaaaccccaatggcgttttttagagaaatagtaaaaaagcactctaaaatttatatggaatctcaagggaccccaaataaccaaaacaatcttgaaaaggaggagcaaagttggaagactcacacttcctgatttcaaaatgtactataagcaatagtaatcaaaactatgttattagcataagggatagatatataaaccaatggaatacaacagagatcccagaaacaaactgtcacatgtatggtccattggtttttcaacaaagaagccaagatcagtcaatgaggaatgggcagcctttttaacaaatggtgctgggaaaactggatattcttatgcaaaacaatgaagtcagacctttatctaacatggtctagaaaattaactcaaaatgggttaaagatctcaacataagagctaaaattataaaactgttataagaatacacaggtaaaaaccttcatggcctggaattaggcaatgatttcttgagtgtgacaccaaaagcacaggcaatacaagaaaaaaatacataatttggatttcatcaaaacgcaaaagttttgtgcttcaaaggataccatcaagagagtgaaaagataacctaaagaatgggagaaaatatttgcaaatcattgtttagtaaataatgaatatctggaatatataaagaacttctataactcaataatttaaaaaacccaattcaaaaatgggtcaaggttttcagtaaacattttcccaaagatatacaaatggccagtaagcacatgaaaagatgcttcatgtcatttgttactagaggaatgcaaatcagaaccacagtgagaaaccattcccacctgttagaaggggcattttccaaaaagtagaagataataagggttaggatgtggagaaattgttatgctagtgggcatataaaatggtacagctgctgtgcaaaacagtgtgaaaggagtttgaacatgcaattactgtataatttgaacacagaattaactatataatccagcagttctattcctaggcttatacccaaatgaattgtgaaccgggactgaaacagatatgtgtacaccaatgttcataattgcattattcataatagccaaatgtccactgacagatgacagggtaaacaaaatgtggtatgtatacacagttgaggaatattcagccttagaaagaaatgaagttatgacacgtgctgcatggatgaactttgaagtcattatgctgagtgaaataagtgaggtgcatacaagtcatgcacagaggaaccatggacctggaataaaaagtcagtcttccacatcctagtcagcctctcttaatttttttcttttcaataacagccattctaactgggtggaggtgatattttattgtggttttaatgtgcatcttcctggctgggccaggtgactcacggctgtaatcccagcattttgggaggctgagacaggcagatcacttgagctcaggcgtttgagaccagcctggccaatatggcaaaaccctgtctctactaaaaatacaaaaattagccaagtgtggtggtgcacgcctgtaatcccagctactcgggaggctgaggcagagaattgcttgaacctgggaggcagaggctgcggtaagccgcgatcgcgccagtgcactccagcctgggtgacagggtgagactccatctcaaaaaaaaaaaaaaaaaaaaagtgtgcatcttcctgatggttagtaatgttgagcattttttcataaacctgttggccatttctgtgtcttttgagaaatgtctcttcctttccttccccaatttttaatgggattaaggacgtggagaaaagggaactcacatatactattggtgggaacataaataaggcagccactatggaaaccagtaggaaagtttctcagaaaacgaaaactagaactatcatatgatccaacaatcccactgctgggtatttatccaaaggaaaagaaatcagtgtatcaaagggatacctgcacccctgcatttattgcagcactagtcacaatagcaaagatgtgaatcagcccaagtgtccatcaactgatgaatggattaaaaaaaaaaaacacaggggatactattcagcctttcaaaagaatgaaatcatgtcatttgcagcaacatggatgaaactgcaggtggttatggtaaatgaaacaagccaggcacagaaaggcaaatattggacgatctcactcatatgtggaagctaaaaaaggtgctcgcatgaagacagagtagagtgccagatgccagtgtctggaaaggatgtgttggtggtagggaggtaaagaaaggttggttaagggtataaacatacagtcagaaggaatgaattctcgtgtttgatagtacagcagggtgattagttaacaacaatttattgtatattttacaatagctaaaagagatttgaatatgtcccaacacaaagaaatgataaagatttgaggtgatggatatgctagttaccctgatttgatcattacacattgtatgtatcaaaatattatatgtaccccataaatatgtacaattattatgtatcagtaaaagttcctccaaaaaaataaaaagagtccatccttcagcagagggagtgcattgttggaggggcaagggtgagaggccaggagagcaggccctgggcttagcctccagcatccacagcacgcgtgtgccctggactgggcctaggaagggtggtgccctggtggcctatgctggccctgtggagcctggccaggccttccctgtacctcctccctaaaaccctgggatggcgtgggctcctttcttctaccactgacatccagtgtttctgttaaattaggtggtctgcctaaggactttttggtttgctaaaagacaaaacaaaacacaggaaataaagcacattttccagttctcagccagcagcgcaggtcctctgtgaccacatggcatccccaaggtgtccgcgtgtatcccacatggggactcagccagctgtgagagggatggacctgcccctgcctggggctacggtccccatactctcccatcaacagggtctgtactcactgcacccttcagggtgaagagggcactgtccgcccctgtggccatcagatggtgtgatcccacctcttggcagaggctggcaccacgccctgatgcttctccatcccagacagggggaagcaggtggttggagagaggtgggaggatgaggttgccaccttctcctgaaaccagcatgggtgctgctgccacagatcatgaatgctttgtccccctttgctgccgtcccatgcagtcaagtgccctgataaccaggagttggctgttaccagatccagagccctcagaggctgcgtgagcaccagccacgtgagcagcctacctggtgtgtttcccagagccgacagagccaagaggggcgttctgaagcccgaagaagcaggagtggccactaggagctgccgtgtgctcgctgtgatggagttgccgaagtgctttgattcctcggttatttcaggcattgtccccctttgggagtgggcatggcctgcccatgtcagtcctaggtcagtggctggaaatgagcagaatggaagcgtaggaagggcttgaggggtgtgggcacatgcttcagctgcgggctccattcaagcatcggtggagggcagtagcaccatgcagacaactggagctccttagtgctccctgggtagccctgcacctctccatggctctcccctgaattctgccccccacgtgatgctgccccaacgtggagatccgggatgtgtcgttgtctttccttgcagagccgtggaggacagcctctgagccatccctgctagtctctgctcctggcacatgaaagtgttcaatacatgtttgtgcagaaagtgaaattaaaatctgtccacttggtagctggatgtggtggcacatgtctgttgtcccagctactccggaggctgaggtaggaggatcagatcacttgagcctggggggtgtgggttgcagtgagccatgattgtgccactgcactccagcctaggtgacagagtgagactccgtctcaaaaacaaattcaatcaataaaatctgtccacatggctcattaatggatagaatgttaagagctggaatagcttcagggtttacctagcctcgccccttgttttacacaaaaagaaactgaggcctggtctcccacttctgcccctgcttggcaggcctagagagtgtgtgtgcatgtgcaaatggagggggtgtgggcattgggagtttaaacttggcttgaatagctaatcagatctatcaaaattaggtttttaccaagcatagtaaaataagacttgtttggtattattagtgatgctaaaactatatgtcacatattggacaaataagcacattttcagatacgcatgtgggattttgattgcatgctgggtttagtccaagattaaatctgcattttgttctgatgtaaaagggacttgaagcagtttttgaggtcatgtgcatagcagcagtgatggaaatgtcctgtgtctgctctgttcagtacagtagcgaccagccacaggtgactactgagctcatgaatgtggccggcgtggctcaggaagtggcttttaaaatttcattttgccaggcgcagtggctcacacctgtaatcccggcactttggaaggccaaggcgggcagatcacttgaggtcaggagttcaagaccaacctagctaacatggtgaaaccccgtctctactaaaatacaaaaattagcccagcatggtggtgggcacctgtaatcccagctacttgggaggctgaggcattagaatcgcttgaaacctggagagggaggttgcagtgggctgagatcatgccactgcagtccagcctgggtgacagagcaagactctgtctcaaaaaaattttttttcatttaattctagtcaattaaaactgaaatttaaataattacctgtggctagtggctactctaatggacagctagagaactgcagcataaccttatctttttaaaaatcttattttaaaaagaattttgtgggtttgaaggaaagattgtctggaagaaggaagtgactgagacatagctttttgacacctggcctggagccttttcgtttagaccaaccaactaagctggatgacaccagcacagtcccttaaattccctggcctcagtttcctcttgtgtaaaatgaggttctatggcttctgctagttctgagattctatcttgccccattcttggcaactgggatatgaagagctctattttaataacgataataataaagaaggcttattaaacactggggatccggctgaatagtcctcaaaccattgtactcagctgggtggagagacctgcaagtaaccaagggaagtttcaaaatgtgggtttccgggctccgcttggacccatttcacagggacccgaaatctgcacgttaacaggtttcacaacgattctcacacaaacaactccctttaaagatacaggccaggccgactccccactggggactgggtgggctgacccacctggcccactcacactcaccatgtggagttttctcctgagagttaggccagggaatgatttttaatgtgggatgctccacgttcctctctgggacttcccatttgcaatgtcttaagtcactttcatgtttgaatttagaaaatcaaaagatgaccgtcttgtttcctgtaaatatcaggaacagagaggagagcaggtggtgtgtttgtcctagacttaaattttaagatttatttttataagttagtttcaagtttgctttctttcgttcttaaaattgagatagggtctcgctctgttgcccgggctgcactgcagaagtgcgatcccggctcactgtagccttgacctcctgggatgaagtgatcctcccctctcagcctcccgagtagctgggactatagtcgctttccaccatgccagctaaaagtttgctttcaaagagtccctattctaatctgttgttggagctctccacaatgaatcaccaaaataccattttaatattagagtagtattttgtcaggaaaaaataggcctgaccctgaacaacttatctgcatagctgtaatattgtcatttttgactcaggctaaatcacttgttaattttaggaggaaatgtcagaggaggttgtccccaaatagcagttattatctgtttcccaggtttatgaacccagctcacagctctgcttgtcaacatctgcagaaggaacttagagaaagactggctccttttacattttttttgttacaatagttaatgtaagagtagttatgtaaacagatcaataagctcattttgaacatgaccctgccaactgtttcaaagctaaagtcacattgactcaggaaggtcagctgtttcatctacagtgtctgtggcccatggaggaactggagccatgtgaggtctaatgacacacgtggcccatgtgcagtcctcatcgttaagtaagtaccctgctgacctcttaagacataaaccaaaaataaactgtagcaaccacttctttttaagtccctttaaagtttagatttttactgttcttagggtgactttgtggctcatcactcttagctttttctcattgcttcttgaatcgctcccctttcctgagtgtttcttggtctgccatcttgacttctcccggggccatgcatctgctccctttgtggctccgtttgctcctaagtctttgcaggatctccacgcagaaggcgtggtgctggatctttaggggacattcagatatagacatgctttgtgccattaaggaacttgtggcttagtaagaagaacagctggttacagaaatgaaccaggacccctacagctgcaggagagaaactaactggaatcagtcaaaacacagagagaagcaaagccgtgtggtggcccagataaccaagggtcctgaggtagatgcatccaccatggccgggttcatggctcagatgatgccatcaggacttggtctctttctagctctgggtcccaccaagcttttccatggtggcctagcagctccactgtcctcttcataggtgcaagagggctttaggggtctttgtcatgtttctggggtctttgctggaacatctgcagaactcacgagattcactccggctgagtgaactgatggcagtggcagtggttggctcagacttagggtgtgtgttttctcctgaaattgagaggatcccacccaggcctcaggggctgaaagttgggggaaggagctaagagaaaattggtgcctgtagctagaagaagctctgtgaatgtcaggcacacaaagctacacgtccatgccagaaagtcacaatactaagggacttctcaagtcctggttctcaggtccttaggggtcctggttcatttctgtaaccagctgttcttcttactaagccacaagttctcacagtcaagtaaaaaccaaatgcgactggagttatgaggatggtgacattgaagctatcagggactgcttcatgttgggtgctttgtgtgggctcccgggtctgcctgggccctgcccttcatccctgtctgcttctctgggagatccctggctcttgggattgtctgtgtgtgggagattcccctggatctggcctggccatgcccactggcttcatggggtacacggcagctcccctgcttctgtgctgtgctccctgcaggtcacaggatccacttctctgcaagtgccagaatcttgtgcagtcctttcgggtccaacgcaagttctttttctgggtaggtcaccccccagccaactggagtcaacacttcctttcccgaattcccgctcactctggcaatctcccttggcccttcggtcgctccgcctttcatcggtttgtctgcaactgcagttccctgtaggcttcatgatggtgaccgtcattcctgatgtttcccaaacaaacgtgcattggtgcttttctggctcaaggggcatgggatttacatttgctgtgggtaggaaagagtggggaatagttcagtgttttcctttatttgtaggaaagtgatgcccagacacaggtacgagtgtctggtttggtacttttactctctcttgacacatacaggcaatctctaatggctgtgttttcatgctgcaaatgatgtacttgcaacgtttggcaaacatggtgctacttgcttataatactgtcagaaattcaatcggcagccctcctagtccccaggaatgtgcttggtggcaggtgttagcagtgcgtgtctatcccccaaaggcttttattgtctcattaatgagcaggtgcaataaatgtgttgtagacagcatctctgttagtctgaagatgtttgggatgtgtgttctatttccacatgtcaccctgtagaggaaaaccaactgttttccttgatacccacaatgcacccagaacacttctgataccagatgtgtgtggggttttgccacaccaagcaattctccagttgtttgcagatgccaactgggtattcagttcagttctgaccccttccatgtggagctagtatggaccctgcaggttaagggctcaatctcatcaggctgccttcacttcagaggccagttgcaagaggtgtcttcaggttacctggaacttctgtgtggcgtggctgcaaatctggtttattatattagtggagggcatgataaaagatacaggcaagcagccagatggagaggtacatagggcgaggtctggaagggtcctgagcacaggggcttccgtctctgtggagttagatgtaccctctccaggtgggtggatgcatccaccagccagaatctccccaaactccaacttgtagggatttttatggaggcttcttcacacaggcatgattggttatcaacacaatatccagcccctctgccctctttggaggatggggtatggagctgaaaactccaagtttctggtcatggctaggtctttctggtgaccagccttcatccaggagccaccagagtcacttcatcagcacagaaaaaaggtttccatcacccagcaaataccaagggattaggagctctgtgttgggaacctcaatcaaagaccaaatatcagaacaaaagatactcctagccccgctatcactcagaaaattaccagggatttaggagctctgtgccaggaaccagggacaaagaccaaatatgtatttttattatgtcacacagctgttcccttccccctttttagtacacttcttatttggagcagtggtgagtagagtatgaggaattctgacatacccacaccccacttcctctgttgttaacaccttacattagcatggtacttttcatacattaacatgatagttctccatttgcaaagctgtagttttttcctgccatcctttttctgtcccaggatcccatactgcctcacagctgtcatgtctccatggactcctctggctatgacagcttctcagactggtcctggggtggtcacggcaggtggatagtggcctggagcttgagagcccgatacgggagggatttgggatgtgggctctgaattggtgggtttgcattaaaaaggcacactcatgagcaagttgttcactatctctaggaattggcagcccctccagggtcaggaaggccccagatgtgaaagcatcagcatacagaaaataagacatggtgactacatctaggtacctcgtataactggaatcatagaatatttgtcctttgtgtctggcatgtcacttaacatcatccaggctcatccatgttttggtatgtgtttagattttttttcttttctttttctttcttttttttttttttttgaggcggagtctcgctctgttgcccaggctggagtgcagtggcgcaatcttggctcactgcaagctctgcctcctgggttcacgccattctcctgcctcagcctcccaagtagctgggactacaggcgcacgccagtatgcccggctaattttttgtatatttagtagagacagggtttcaccatgttagccaggatggtctcgatctcttgacttcgtgatccgcccgcctcagcctcccaaagtgctgggattacaggtgcgagccaccgcacctggccgattttttttttcttcttaaggcagactaatattccgtcgtatggatatactatatattgtttatccattcaaatacggacattcctcaacttgggatggtttgactttagagtttttgactttatgatggtgcaaaagccatatacttccagtagaaatctgtaaccctggccaggcatagtgcctcacgcctgtaaacccagcacttccgagaggccaaggtggggggctctcttgaggccaggagtttgagaccagcctggccaacatggtgaaaccccatctttactaaaaaaaatggaaaaattagctgggcatgatggtgcatgcctgttatcccagttactcggggggctgaggcaggagaattgcttgaacctagtaggtagaggttgaagtgagctgagatagtaccactgcactccagcctgggcaacagagagagatcatcttaaaaaataaaaataggaaagaaaagaaactgtaaccccattgtaagtcagtcttccacttatggtggggttatgtcctgataaacccattgtaatgtcagaaaatcgtaagtcggggatcatcagctatgtcaccagcattaagtacattttttaacttatgatattgttgacttaaaatgggtttgtctggacatgaccctatcataagtgctggagcatctgtgtttgtttctagagaagataaaaaattccacttcatttctaaatcccctaggagttcactggccaataggactccctttgggggctttgggggcttctcccatctcggctaagggacagctcaaacaggaaggcaggataggtcaaactcatttgcagtaggagttgggttgaattgtgtaagacaaaagtacactttgttatgtgtgattaattgtcacagttcctgaatgtcagcacggacagagcagcagagttggcttctgggacacagtttccatctgctgtccctgcctggaaggaggcttaggtggcttgcctagcatggacttagtgaccccatctcctctcctcccggagccaggccagagcggctttgccgaagtctcggatgaactgtcaggctggagcagttcttcatccaggggctgtttcctgctctaattactgctctttcttctacagctgagaggaattggtgggtggatgtgggagaggtgagctaatgcgatgacattttgacaagtgtgttacaataaaaaataactcccctgggagaaggttaatgcagttatcaccacgttcatgttggcagccttagatctgtgcctggttggggcaggatgctttgcttttctcgtgcagaccaagtctcacccacattctaatggctagtgcttaaatttttttccagaaacatctatgaagaataaatatcgtgctctgttcatagatttttccacttgggctttttgctgtatttctttattccatgataagctacttctttccacctactagttaagtaggctgcttccctctgctctcagatgacatgtggctgaggacttcatactaacattagcctaagtaaaaatataattagtatttttagtctgcttccaaattaaatcttaccgtgcatgctaaaagagactacagagcatttgggatttatttgttgtgttggatcttctattccttgttctcctcttattcatttttagtaatgtagaatttactctagctggattagatatttgccattaagaaaaacagctttattgagatgtaattcacatgccatgtaatttgcccttttaaagtgttcaacctagaggcttgcagtatattcacagagttgtgtccatcaccacaatacattgtagaatattttatcctttttagtactgatgtgtatgaatctgccacgttttatttatccgttcattagatgatggacatttgggttgttttcactttggggctattatgaacaatgccgctacaagtatttatgtgtaagtgtctgtttggtcttaagttacgtttctcttgtagtggaatgaccagatcatgtggtaactctgtttaaccatttaaggaacttccaggctatttactaaagtggctgcatcactaccacccaacaacataggagaattacagttccccatatccttgccaacacatactatgaactgtctttttgactgtagtcatcctagaaggatcattttttcagagttggaaaatggtagagagtagttgctaaaagtataaatatggctcaggttagtacttatcactaactgtgttacctggctgagtcacttaatttctctgagccctggtctgcctatctatctgtaaataggagatggttacacctgtcccgtagggtgcttgtgaacactgactgagggggaaatgaaacagcacagcgtctcccatgctgtaatgttcaataagcgtggacctttctcatcatgcctaaaaggagaccaactgtgagtctctgcccctccttctaccctgtccatcccttctttctggaaaggggtgattgattaacaatgttttagagaaatgtgggatcatccaaagcaaagatgagtggataggaagcatcatggtgatggaaccaggagctctatgagctgtttctggatattccctgatgataattaaagggtcccctaaacacagctgagacttccattttatacttgaaaactaaattttaatgcaaaattttatcgaggttcaatttatacacagtagaattcacactttttggtttacagttctgtgagttttgacaaacaactgcagttgagtgagcaccactgagacaggagagttcccttacccctttgtgagacttgcgataggggtgtggcttgcttacttggccaccatgtgctcaaaccccttgcaggatgggaagcacgcagatgagtgggtgctggggccggagctagtgcttttgggctccatcccacagcagtggcgaggggtgtgttacaattaatgctcctttagcagttgctgtccatggatggctaggtgttaaccagctcagtggacagtcagggtgacagcttcttacaccttgtcctcttggtacccaggttcttgtccagcaccctggaagaatcaggtctcatggacttgaaggatggtgaatgcagaggttgtattgagtgatggaggtggctctcagtgggttggggacctggaaaggggagagagtgggaagataatcttcccctggagtttggctgtccccagctgaactcctctctgaccatccccagctgaattcctttcaatgttcagacacttcgtgtcttccctcctctgctgcactgctctacttctctgccagtgcagtttgggggttttataggtacaggatgggggtgtggtgggccagggtggttttggaaaaagcaacatttgagtgggaaaacagggataactgttctcatttagggccatggtgtccaggcttgagggtggggcctttgccggggaaccaccctcttctacccagtatttccctgcctcctgttcgtatcaccaccacactcaagatgcagagctctatccttttggctcggaatattcatcagctgtggccaccctggcagtcccacatcagctttctgttcctgccgttttgcatttccagaatgccatataaataggatcacagagtatgtagctcttgagtctggcttctctcacttatgtagcacatttgcgattggtctgcattgttttgtctatcagtagggtgttcctctttattgctgcataatattccatcatatggaggtaccacagtttgcatatccatttaacactgaaggatatttgaattgtttccagtttttggcagtcattgataaagccacagtaaacattgacatgaaggtttttgtgttaatatgtttccatttctcttggataaatattaacatttaggagtagaattgctggatcataaggtgaatgtgtgtttaatttccttataggaaatgccagattgtttttcaaaatagctataccatgaagttaatagtattttaatcaataataggccattggaatctctgaatttgttattagtcagttacttttctgaatggactagattctgaaactgttactaaggatgccagtaaatgcacctttcatggacagttcatataggaaaactttaggttagatgaagtgaaactgtttctttattgcaggattcttagtgcctaaaacataaggcccttaaggggacagatgaaacaggcaatttctctaaatttttttgaccacgaatgtctcatggagctagtgttctttggaaccaattttggggaacactgggctagagaacacacattcttctcagcgagtagcttgtattttatctgaaacatttctgtattggtcaggataggctctgttgtgctgcagtaacaggctgccctcgttgacagctgtttaaaacaataaatgtttgtttctcattcacgctgttagattatctcagcaggcacagggctctgcttcttgttgatctcacaggggtgtgggctgatgagaagagagtgaggctgatagcacacaggctcttggagtcttctgtgtgggagcagcacacaccacgtttatttgctgaaacaaattacatcttcacacctgacttcctggggaaattcaaccatgatatgttcctgagaaaaagagagatggaatattgaacagttctagttgccacctcagattctaaaggattcagggcaaactagtttgttccattttgtgtttctgtgtatctgagttgttgtatgagtgtcctaacctcagcacctgttgtcaccagatcccaacgtttgactatggcatatctttatctgatatctttagaagctgccctggtcccttcagcccagtaggccatcatgttctcctttatggtgaggcagagctttagaaccagaccacagagcaataagcagtacggttttagagttgggaggggggccctgggaagactgtctggcccatggtttctaaacacttcagagcgggaggaacctgtcttctaatgaaggtttaaggacagcgagcatgtaaaatagatcaaccctgaatagttctgggaggactggttggtgggccaagaattctcactgcaaggtctttcttctcccctcccccttcctacctcctcttcatccaccctagggatctctaagggccactaaagagaccagtttgagagaccctaatcttttcaaagcctttgtgtgtgttagctgaggagagtgactaggtaccatacaaatcaggttacttttgagagcaaggggccctattaaccctcatgccaggacaacaggtgtgggtggcacatggggccatctggtcacctggagagcaagaagcaggtgctgctggaagtgactggtaagatggttctcctgggtttgagagatgccatggcatgggcctcgaaggctgttgtttgtttgttttgcttttgctgttttttggtgtcattagagggagagagggagagtgtacgtgtctaccaacataaagattgaaggtgtgcagtcgaggcatccctgtgggaagtgtgagctctgatgacaacacttgttagactctctactgagcccctctctccctgttcttatttcatcttcacgtgcactcggcaccagggtgggcctcctctcctacatgcttgactgataaaacctcttaaccctgccaagccagattgcacaggagagggccttctaagctcactgcccttactttaagaggctgtggggttggtttcaccttgacctattataatatgcatgctcactgcctttactttaagaggctgtggggttggtttcaccttgacctattataatatgcatgctcactgcccttactttaagaggctgtggggttggtttcgccttgacctattataatatgcatgaagctattcacattttgaacctctccaagatcaatagtttatttctgggggacatttttagaactcttaatcactgccaaaagaaagaaaactttctggaagtgaaaactgcctcccaattacaatgtaatatacttgcctttggacctcttattaatgaccaaattcccctcggtcctaaagtccaggttgtttctgcatgcagtgtcggggcaggggaataatgagcaatgcccagcagtgcctccagagtgtgcgagcatcccagtgaagcactctggaagagctcccatgtcattggagtaagctgtgcatcacttccattctctttctcctcaaacttcaccttgagcacacagctgtgagccgtgttttttaggaatcagaaaaggtggtcttcttgggtcagtgcattgtaggaaataaatggtatattttgttttggttatttctttgcatacacttggttgaagatgacaatgaatgagggctttattttgttgagaaacagggacagtaccattaacattaccacgagaagatgctgcccaaatggggagattaaagacgcctaaaggtcaaggtcgaagaaaggaaatcccaggtgacactgccccttattttattcttacagcatggactgtttcctgtttgcaaactggtgctgccctgaagtgaggggtgagccttcttagccaggaaacagcctatacatttaagaggactctcctcagagatcaaaattgcaggtacagtctccggctgtgaaacgctgcagtgacctgtacttacagctcaggggacaaggcataagtatagttctagggcagggagaggcagtccccagagaaatttcaactggcctaagggtttaatattaaagaccctggacacagaaagatcaggggaagctaaacttagaaggtagagaagccaacacaaatgaaagcagtgacatcatctcactgcaaacaatgttaaaataagaaataaacaagaatgtcaggccaaaagacaaaatacacatggaggaaagatgttcacggaatagattttaaagagttaatatttgtaatatatgaacactctgttaaaagtggttgtttaaaactactaaaaccagaccaccagcaaagaatgtatagaaataagtcagtagaggaactgacaataattaatgttggaagacatttatctttatcagaaaacatggagaaatgtttgatcttggtaatcaaagaggtacacattgaaaaaaaatgttgtttctcagctttcaaagtaacaaagagtataaaaaagtgcacagtcttaacaagtctatggagaaggttggtggaaggctggtgaaataatgcttttgggaaccagcatgatggattggaagtctttaaaacaagcttgtccaacccgcggcctgcaggctgcatgtggcccagggaatggctttgaatgtgacccaacacaaattcgcaaactttcttaaaacattatgagatttttgtgtgtgtgaattttttttaaagctcatcggctattgttagtgttagtatattttatgtgaggcccaagacggttcttccagtgtggcccagggaagacaaaagattggacactcctacttttaaatgcccgtgtctttgatttagcgatgacatctggggatcttccaaaagaaaatcatcctgaaaacaaacacaaaaaacaaatactttctacacaaagtttccattttagtataaaataaagcaaaaaatgaagaacaacttggatattattaatagtgtggagattgctaaataagctatggtatataaattaacttagtgttatgccaccaaattaaaatggtttttatgaccacgcaatggctcatgcttgtaatcctagcacttgaggtcaggagttcaaaatcagcctgggaaacatgatgaggccccatctctacaaaatattaaaaaattagccaagcatggtggcatctgcctgtaatcccaggtggagctgaggcaggagcatttcttgagccttggagttggaggctgcagtgaaccatgatcatgcgggtgcactctagcttgggtgacagagtgaagcctgtctcttaaaaaaaaataataaaataaaatggtttttatgaagactaattcaatagaaaagtgttggctctaaaaatgaagcaggataccagatggcaagtacactaatatcactgtatttttaaaaatcttataaatctatgcacagagacaaggctggaagacaactaccagagcatgacagctagattgtgggtgctttaaaaaattttctctttttctttaatttatacatttcttgtttgttatgtatatttgtgtgtgtgtgtgtgtgtgtgtgtgtgtgtgtgtgtgtgtgtgtgtgtgagagtgagacagagcctcaccttgttgcccaggctggagtgcagtggtgcgatctctgctggaaactggaaactttggaggggacattttttcaggaattctttttcgcattatggatgccactgtttcagagtttcttaaacccagagtgtgatgaatggaggaggagagtgctcacaggatggcctcactccacagaggaccggatgcccttgttgctcaagacttccttcccccaggcagctgctacatgcttgcatcctctgtggctcttgcaatacagaggcaaggcccctgatgaaacccggcgaggtgtggtctgccctggaggacagcagccagtgtggggggcagtcccttctctctgtcccaagggaggatacagctccactgtggtcactggctctatgtgagggggtgcatgcatcagagacaacagatgagagggcccttcagttggcttttctgcctccagttctttctgttcatgagaggaaaagctactggtagacagaacaatgttaaatgtaataaaaataagcaagttccctgggtttatgcagtgccaaatgtcaagatggttgtatacaggagaagacgtccaagacacgtcttttccgagtgtcccagagctcagaactctgtgagcactttgagcttccccagacctctttcttccctgggtgtgagccctgcacagtgctccgaaaagagctggggtccgtaaatacggatggcaaacagctcacctgggtttctcacatggatttgttttcttgggggtctctgtatggaagcttttatcccttcctagggggctataggagtatttttgttaagattcaatgggtcatttccaaagtagtcatttctttctcctcacacaaaaatgaactgaataagaataaggatacagttttctagtgaaaattggggtcttccctgctccttgcctccaatcaagtaaaagctttttagaacaaacggactacaatattctgaagtgattttgaatttggccccatatttgactctgcggtccgatgagggacacggggttagtgggcagacaccattgtttgcacacacgagactgggtacagagccaggcgtgatcatccaggataacagggaggaaagagaggccgatgaagccactgatttttaagagctttcttggtggagtaatagattttagggagggagttgctctgccaagtgctccagcttaaatggagccacctgtggaaaggagctggcggcactgctgtgggagtcccttgtctttgggaggggtgtttcacggccacctgcctttcatccccacagctcacagcaacttacagaatttccgaccgtctccttggagacttagagaaatgtgtgctgaaggtgaggagtcactcaatcactggcagccaggcggaggtgactgatagcaaaatgtgctctagttgtagtggggcttgcagctgggtatcctctgtggaatgcttgctggctcatgatagatgagtcacttgtctgtagtggtggccggggctctggcccagacccttctctgttttcttatgtgagtgaaggctgttgtattgcatagtgggtgaaccacacctggggattctagacttggcactgccctctcttcttgtggaaccatggatcacccatttatcacctctgggcctcagttttctcacatgcaaaatcagggttgaagccaggcatggtggctcacgcctataatttcagcactttgggaggcccaggagggcagatcacttgaggtcgggagtccaacatggttgaaacctcatctttactaaaaatacaaaaaaattagtcaggtgtggtggctcatgcctgtaatcccagctacttgggaggctgaggcaggaaaattgcttaaacctgggaggcggagcttgcagtgagccaagatcgcacctctgcactccagcctgggcgacaaacaaaaaaacaaacaaacaaaatacaaacaacaaaaactaaaaccagagtcagggttgggcttgatggtccctatcagtagcagagtcccctggtgtggcactttgacttgtggataaataggtttttcattgctgcagtttcaaaccttcagcttctctaatatcccctgccactgacggattatttcacacgaaccagagaggccattaggtgagaatgccttcatcttccctccctcccacctctgagcacccttctgtttccttctgagcttcttcctatttcctcctgtcgtccttctcctctctagaccctgaggggtttctcttctcttctaaggttacttcttcctactggactcctgacacccccacccccacccctgcccttgggaacttgattccatctctctctctctgtctctctgtcttgctccccgcttcttttctcatgttccatcttctttctccctcacctccttataatccacatccaaacaagtccacatctccccaaaaactccatgcctcccttttggccaaaaagaactctatagagcatcagaagaataattactaaaaatatatgtttaaaataagtggccttagtagtaagctctgagaatgagaagcttcattgtctagtaagttaatacaaattagtcgacagtcaatgatgacaagaagagagcgaaataagtttgtacttacatacctcaaaacaaaaactctctgaaaaagcagtttgtttgtctcttgacctaacaattccagcctaagaatataacaacaacaacagaaaagacaaattcatttgtagtaatggccattataaaagatggacggatattggagcatttgaagtggaaaaaaagtatacaaaattcatcttgctgtgggaccctctccccttttctagggccatatgggtatagatgcattgggggaaaaaatggctggaagaaatactttaggaatgtcctttttttttctttatatcttttgaaatttcctacataagctcgtattacattttgttggcagaaaatcagatttataaccatccgtcctccctcccacacaaccttcttccctcccacttggcctcaggcattgaggtttggcttggttcggtcagctctgctgggagggcccctgggactctctgtctccccgcctcgccatggtgagggttcggcagttctctcccccagtccctgcagtccctcttctctggcttctgtatctgccagttttctgttcccaccctgcgtgtttccctagtgtcttgaataatttttttttttttttgagatggagtcttgctctgtcccccaggctagagtgcagtggtgcgatctcggctcactgcaagctccgcctcccgggttcacgccattctcctgcctcagcctcccgagtagctgggactacaggggcccaccacctctgcttggacctgagacacgatgttccccagagtgctgctttcatggtggttttcttggcctgacacctgtgagtgatcagactgggaaagaggattccctttcccagtccttcgtcctgcaagtggctggctctggtgtagacgggggtgtcataggtagcctgccacacagggtggctcctctgttcgcctcctgttttccctggtcatggtgggctccctgaggaatcacttcccctcttgtctgtgttggtgtcctagcttaggtggccccttttcctgctgttctcaactttggtagcaccttggcaccatctggggagctttgtagtcctgaggcatgggttccccctagcagttttaatgtcaccaattgggtggaagccaggcctgggagtctagaagctcccagctgagtctgctggctgctacactgaggaccttgtctcctgtctgtgtcgtgcctcgttgcagatggtcacacccatagagcagcccgtgcctagagtcctgggccttggggctcagaatggggccaggccttcctgctgagccgccccagtgacacaggcactgattggccactggagaagcgggagtgaatggcaacaaggccaagtgggaagcctgtgtctgcactgaccaccgtgccccaggccggcctagcccaaagagacctcctgctttgacttttccttactgggctgtgcctaccttgtgaaaactccagtaaaattaatccaatggctgcttggccagacagtcaggacacatttcgtgagccctggtctgggctcagaggtttggagtccacagctgggccttgatcttctttccccagtgacgtcctcaggctggggtgtggcaagtttggagaggatggggaccctcactctgtggcccaaatagagcaatagggcctttttcttctgcttcagattatctattctcacaaagggaacaggcatccaaaaacctcacagaacagcattaggaaatcaggaattgcagccaaaggactcttgtcctctgtgtgaggctgagtcggacttccgtgactcatggttctgttattctgagtgtttgagactattaaggaaattgaatttagagtgtcgtgatttgtgagaacaatgaaatcggctgttcatattcctgtagcgtcagcagcagatgagatgggaggtgttgtctttcaggcagacaattgggagcaggctattgccttgtgcaggtgtcttgtaagggctgaggaaagcttcttgaggtctgagcagtagctgagaggtctgcagatcccctgcctcagtagagggacccatcagcaactgccagtcctgggccagagccggcgtcagccgtacaccgcatggatcctgagactcccgtgtgcttttgcagccctgagattccatgtgcttagtctccttctgttcaccccttaccagatattcccggggcacatgctggagtgcctgtcctttcttcttgcatcaagtgtgtggtggcaaatgaggaagggattttcgtattctcctcgtgtgcattccagccagggaggccaatgaacaggaaatgctcatgaaaaaagtcagatggggcaggtgacatacaggtaattaacaccatgggaacctataatggagaatgacagagaatgacttttatatttggtggctggggaacatttttaaagagatggtgtctaaactgagagctgaagatatgagtggtgagaaggggccagggaggcaaaggtcggggacaatcgcctggtacagggagactaaggagagattgagcatggtgttttcagagaacctcggggtggcccgagtggttttgcaatccaggaaaggagtttgggacatgttctctgtgcgttgggaagccattgaaaggctgtaatcaggacaatacgtgatctggtttgctttagaaagatcttgagtgagtaaatagatgagtgagtagtgagtgagagaggcttagacaccagaagagctcatgccaccgacatgcagccatgggcacttggtggttctgtttgccctgcccagctcatgtgctcataggtgaagtttttgccatcagcagtgatcattaaacagtgagatgggtaattgtagcgagggtattttctctgttggtcctagattgcctagaatcctgatagaaagaatagttttccttgaacttacaattcagcaaatcctctgtagctattttttttgtactgtttgaaggatgtactatttatggactgcaaaacaatggattctaatccgagctggagataaaacatgacgggggcataaaacatttaagaagcacacaggaggtacaacaaagcattatgcaacagcttcttcaggcaaatgtgcacattttgcatctaggagcaggtgagaaaagtgacacagagcagaattgtcctaatatataaacctcaggtggtattatgaaagtaaatactatattcagtctttaggcaaaaccatcagtactgatttttgcccatgaatgcaattctgtcttcctgatgtgttggaactacccccaaacaaatgccaaatgtgagattgaaaattaaatttatagggccctaagctgtttggaactgtttttaagatgagagctgttccacctaatagttgctataggaataagctggcaggatgaggaaaacccaagaatgccagttagcaggagaagatatcggagtttctgttaggcaaacacagggaggaaatatggagatggtattatctgcagcactgagaatcacagcctctagagacaggagtcaaagtcactcagaacctcaatgcccgggcccttgaggcagcctgtggcccagggcaggtgcccctcctgctgctggccttggaggggtggcctgagaacaggggaggttttacacacctttcccactgcagcctgtgccatcgtcatattctgcagggtgtggacacaagttagaagcaagacaaagttggctggccctgagcttgcccttgggtttgagacttgatcaggtgccagtatctctatggagaactgtgagtacagttcttgctgtctttgttgttggatggcgtcccctttaagtgtttagtcctgttgtctgggcagccttgtgctgagggacccattgctgagcagagtgtgcccagttctcagcagatagaatgagagcccctccaccatctcacgggaagctcccctgctggagcccacttgggttcttgccatgtggcttctgtgctcctggtgaatgtatagctcctgtctctctagggtcatcttactggctgctctgaggttttcagaccacagagacaggagtagagctgtctgctgccatggtcaaggtgaggcccatgcctgtggtcattccctctgtccccaacttggggacagtgtcaacctctgctgtaactggaattccctcttggtgctttcatgtaatttttgtttctttgtggtttttgtctggatattcagaccctcagagtctggcaaaataatttgcacattagtgcttcctatgtgagttgattattttcctttctaagagtcaactagaaataaaaagtaaattaagtttttatttttattggacaaactgcacctctagcctgacatgttattataggaacttgggctttgaggagacaaatttaagtctatatataaaataactttacgagttttcatatttgcttcttatcccttgaactgagaccatatttgttaagatttctctctgaaattggccacaataaatatcttaacaaattcaggaaattcattctaagtcatcatttttgctataattcctggaccttcagattttctggttaaagttgcctcagggggaccctcagatctttatggagtttgtaaatccatcatgagagattgaatctagagtacttaacacttgaaatctagagtacttaacacaatcccgggcatcatttactggtctcaggaaatcctttgagggaacaaaaaaaaattactgctataatgaaagtctctaagctggcttattcacaaaaaaccagtgtggtgaaacaaaaaaagagcatggatttttgaaatcaagacacctggattcatacttcaattttacacctaggactgtgataacattgggcaagttacttagcttctgtttcttcatttgtgaagtgggaggatacctgctttgcagggtggttgtgaggttgacagaggctgccttaggcttttcaagctgctgtaacaaaataccgtaaacgcagtggtttaaaagcggcagcaatttatttcccacagttctagacgctggtcgtccaagatcaaggcactggcagattcgatgtctggtaaagactggcctccaggttcacagacggtgccttctcactgtgtcctcccatggtagagggggcaaggcaactctccgaggcctctttagtaagacactaatcccattcatgagggctccaccctcacgatccggtcacctccccaaaggcctcagctcctaatagcattaccttggaggttaggatttaacatatgacttttaggatgacacatacattcagtccattgcatactccaaggaatatcatgcctaacaggatggctggagagtgtagatgtttcaccactgtagtaccctccagccttcctttccacacacagccagtgtatctccctgcacgtgtcttatttgacctgtggacttaacgtgcctggtggaattgccctggctcgtcctaaggctggatgtctctgctcagatggactgggaggcagtggggatgccggggtggagatgatacctgagcctggagagcctcgcttgctctgagttgaactgcagtcggatgccctagctcatccacgtgcttctgttgtgacagcgatgctgggggtgtcttccttccattcggtggcacaggtttgatgctaggacccctctgactcagggctccaggccaatgctgcagctcagccttgaggaggcgttcccagagcatgaggaggactcatggtggaggatgctggttagtctctttctggtcggaccctcactttttgagatgatgtgacatctttcctgtagtcacaactacattcaactctaaaaccattttaatttttcattttcccctgtttggggaattgtaatcccatgggtgtatggatattatccagagacatgaaacatggagtttgggtttgcagaggacaaggaagctatgagataagggagaacagaatgaagtcacaccccacacagatgcccacagattatgtgctgcagtgagtccttaatgtcctggaatcggtgacacaccaaggatggctttcaagagctttcttgagccctttatccaaatctctgcagcccctccctgaacttcgttagtttctagatcagtttacttcctaagtaacctagcacacttgtgtaagaccagctgagcttcccagatgatccctgaacgtcacggctcctgaccgttcctctgaggacacttcctggaagtttttgtgcaaaaccattattcttcccaccttaaggcaggcatgggtggtcacgtgtcagtccagcctgctgtgctcttcctgtgcagaaactcttgcctggttacacttggcgacttctctttgtaaacaaaggtgtgagtgtccttaacacctcacagttgacggactggctgcgttagctcttcctttgttagtttctgattgccagtgaaggagaacatcttctatatgtttttccctgtatcagttaggatttgctgtataacagaaacccaaaacttagaggcttaaaataatacctttttatttaactcactgttgtgtgtgttggctggggttactggggcagcaaggatggcctgggttcctctccacatggtctcttatatcccccaaaggctagcctgggcgtcttcatgtggtggactgaaggtcccagtaagcaacaagaaaaggcagactccaacgtgcaagcgctttttaaacctccatctgcatcataattgttgttgtctcattagccaaaggaagtcacagggctgccaaatctagaggcaaccttggatggaatattccaagggcctggatccagggaacatgaatcaattggaggctgttactctacaatccaccacaaagtccactgcctgttttcttttgattgttgatcttttatattaggaggagtttttaaaatatattctggatattaattctttcattgctatatatgttgattcagatgaataggagttcttacttttaataaacaaggtcacttctctcaatctttttcttttctgatgtgctcattttggctattgttttaaaaatcttccccacccttgaagccatacagatattcttcttattgtttcctgaaagttttatggttttgcctctcatgattatgtgttatcgctctcatttttttccttttggtaggataattaagaagtgtttttattaggtaagctccattttctcactgcatcaaagtcatttatgcaggcctgctctgcaagtggcattttccaagtggaattaaatggatgttactaccctgtagttaattccagtctaagacaattgcaatgcagacagaaaccttgagacattaattgaccaaacatgtatattaaataggtttgaatattcaagtgcaagcaaataattagtacacttggtgagtgaagagaaaaatgaagtactgcatttctttcctttccttctttccttgcctccttcttttctttcttcctttccttctttccttccttctctctctctctctttctcttctttctgtctttctctttctgtctctctttctctttcgttttctctctttctctcttttctccttttcgttttcctttttcctttcctttttcctttcctttcctgtcctttcctgtcctgtcctgtcctgtcctgtcctgtcctgtcctgtcctgtcttgctctgtcacccaggctgggatgcagcctccaactcctgggcctaagtgatcctcccacctcagcctcctgagtagctgggactataggtgcatgccaccatgcccagctaatttgtaattttgtgtagagaccacagctcactatgttgcctaggctggtcttaaactcctggcttcaagcaatttccctgtcttggcctctcaaaaaaggattgattacaggtgtgggccaccacacctggccaagaactacactcgttaacttcagctaagcaactcccccccgactcctaccctgttctttcttcaggtttctgttgaaaagttatttggtaaaagaagagggcctgagcagtgattcttaagatggagggaaggaaacctaacacataatctttgcaaaaaatccccgagcaagttggtattattgccatgactacatgaggaaaccaaagctcagaggatctggagaattgttgagcaaggaacccttccctcctgcaccagatctctctctctttctctctttctctttctttctttctttctttctttctttctttctttctttcattctttctttttctttctttctttccttccttccttccttccttccttccttccttccttccttccttccttcctttcctttctttctttttctttctttctttctctttctttctctctctctttctctgtttctctctttctttctttctttcttgacagagtcttgctgtgtcatcaaggctggagtacagtggtgcgatctcagctcactgcaagctccgcaagctccgccttccaggttcacgccattctcctgcctcagcctcctgagtagctgggactacaggcgcccgccaccgcgcccggctaattttttgttttatttatttattttttaatttttttattttttagtagagacggggtttcactgtgttagccaggatggtctcgatctcctgacctcatgatccacctgccttggcctcccaaagtgctgggattacaggcgtgagccaccgcgcccggcctgcaccagatctctaccaaattttaagtcagtgaaatataaatgaaaacttgttatttttaccatgactgacatcagtgtttttgagggcaaaacagtaggtgttcctttttttttttttttgtctaattagaattcttgtttttatctgtccttaaggtttttctctgtctttaaggtttttctccactcctaggaatgttccctaaggttttgatataattcaggaatttgtatttagggaaaggcaactgaaccaagttacgagaatgtttagaactttggaagccctggggaagacatctcgcccattgctggttggacagagccaacgtgggggtttctaaacatgcacaagctaacagtctccatcagctctgaattcacttctgagcttagcaatgtaagcttgtattatatacaacttcgtttcttcatgaaacaatcatcataataaattttgatatactcggaaaacttaccaggtttaaatatttattattattattaaaataaatggaataataatggactggattttaaaggatctagaatttgaccgtttttctttttcaaaacatgataaatacagaaaaacctttaacaaaataataacagtaataataataataatagtggtatgtttcctgggctaaatttagaaaactattgagtatgaggcaaatatggaaaacatatttatatcaaaggaggacctagaagcaaactaccataacttgccaaattcaacttctatgtttgttataatttagtaattagctattttagaaaaaaaaagtgcttcaatagggaattaggattttcagaattttgaagccctgggaaataattatatccagtgctgtttaggtagaacaaaaaatcaaatcacttacctggagtaaatccaaaaaagtgaaaccattttaaaaattatctttttaaatttctaaattaacgttgtttaggcatatacattgcattctgtatagctttttttttcaaattattaatatttttatttatttattttttttgagattgagtctcactctgtcgcccaggctggagtgcagtggcatgatctcggctcatggcaacctctgcctcctaggttcaagtgattcccctgcctcagcctcccacagtagctgggattacaggcatctgccaccatgcctggctaatttttttatttttagtagagatggggtttcaccatgttggccaggctggtctcgaactccttaccttgggttatccacccgcctcagcctcccaaagtgctgggattaattacaggcgtgagccaccatgcccggcccaaattatctttaacaaagaattagagagatgcaagacacccggcctgccgcgggagcatgagggagtctgtgcattcctttccaaggcatctgtgagtgcatggagtagacaccatgagcaaagctcaccctcccgagttgaaaaaatctatggacaagaagttgtcattgaaattaaatggtggcagacatgtccaaggaatattgtggtcatttggtccctttatgaatcttgtgatagatgaatgtgtggagatggcgactggtgggcaacagaacaatattggaatggtggtaataggaaatagtatcatcatgttagaagccttggaacgagtataaataatggctgttcagcagagaaacccatgtcctctcttcataggttctattttactatgatgtaaaaattaggtcgtgtacattttcatattagactttttgttaaataaacttttgtaatagtcaaaaaaagaattagataatactaaaaaataccaaatatttaatatttttaataccaattttctaatccctttaaagtacataatgagttttaagaggatgggttccagggttctagactttgagttctcaaccttatgttcttaaatcggcaaaagtaccccccaaataaaacaagataaaacttttactgaacacaatggctcacgactataatcccaccactttgggaggccaaggtaggaggatggatcacttgagctaaggagttagagatcagcctgggcaacatatagagatgccatctctacaaaaaatacaaatagctgagtggggtgtcacaggcctatagtctcagctactcaggaggctgaggttggaggatggattgcttaagcctgggaggcagaggttgcagtgaaccaagattgcaccactgcgctccagcccaggtgacacagtgagaccctgtctcagaggagaaaaaaaaaaaaaactttcaacattataatttaaaaagatgttttaggcttaatttagaaagtttacattgttcaacagaagccgggtttatttttagaggaatagttggatgcaaactctcaaaattttctgaacttaatgtttacttctgaaactgcttcctcaggcttgttttataagctttgtctttttacaggccttcagttttagctttatcatgggttgatcagccgtcctggtgttcctgggactgaggagtttcttgggatgtgggactctcagtgctaaaaccagggatatttcaggcaaactagaatgacagaatgagttaagatggattatgtcctgataaacccatcaatagttggaagtatcataagttgaaaacgcatgtaatacaccaaacctacagaacctcatagctcagcctagcctactttaaatgtactcagaacaatatacattaggctggctaatgtaatcagcctacagttgggctgaatcatgtaacacaaagcctgttgtataataaagtgttgaatatctgtgtcatttacctaatactgtcttgaaagtgaaaaacactggttatataggtatgtgaagtacagtttgggtattgtattgtaccatcataaagtagaaaaatcctaagtcagcccatcgtaagtaggggactgactgtagtcaatcaccctattcttcttgaacctcaaaaagcaaaatccatcagtttaaatgtagacccacatgtgtagcctttactttttttttctttttttttatttaagagctagagtcttgctctgttgcccaggctggagtgcagtggtgcgatctcaggtcactgcaacctccacctcacgagttcaagtgattctcctgcctcagccttctgagtagctgggattacagctacgtgccaccatgcctggctagtttttgtatttttagtagagatggggtttcacaaggctggtcttgaactcctgacctgaagtgatccgcctgcctcagcctcccaaagtgctgggattgcaggcatgagccactgcgcccggcctagcctttaaatttgattaaggtgctttgattagtttatttccttgggaggcagaagtgtttacaaagaagaggccccaggataggctgtgtccatgtggtttcaggacgtgggcgctgctttccgggtgggctggtgagggcattttttgctgcccagctctcatgtttcccaggcttgctatttgttttctaatccaggcaacagaaataccacttgtgtccatgattttcatgctggatctaagatgttgaggcagcaaattcttattctgactaatttaacagtctttcggtttagcctgtgcttggggctgtgcttagaattttgataaaaatggttgtatctgggtcatttggaaaggaatttggctgtctggaaaatagaacatataatagaacaggtggttattaaagcaccaggccaagtggagaccatgatttctctttgatttagatgcaaagattgctatataggttgacacacaaagatttataatttgtaatttaagaaaataattgttcagggagcagaaaccagaaagtaatgtatgagtattttttcttgaactgcattttcttctttctaaaagcatggaagtctttaattccccttccacagctcttaaggctgtcaaatgtattgggaatggggcctggcccctgagatgtgtaggttatacatcatacaactcaggggccaggcaccattcacatcacatttatcctagatttgtcttgaaggggtgctttttctgacccacatgagaatttccctgggctagtggcagccagcatgactgcctcaccaacccctctagcaaggactcttagaggaaaacatgaagaaaatcacatttttcttctgttagcattttatagacttcttcactccactccagacctttggatgtctgacctgaggacaatcaatatgtttttctagagtttttagcacgcagcagcatagtggcttagagtgcagaccaaggagtcagtgccataattttctacctgtataatcctgtgcaagttggcctctctgtgcctcagtttccccatctgtaaaatgggggcagcacattcctcattggactgttggggaggttaaatggattaatgctgtaaagtacttagaatagggcctgacacattgcatgtaaatgttaccagcctcgttcagctttgcctctgacactgagctgatgtacctgggtctggcaatacaacattgtagatgctgattaaaacttgaggcacatgtgaagaaaccatgactattcccatgaccccgtgagaaggttggtcaaatagtttctttgtcttctgctgggtttcacttcctgctgtctcagctgtaccccctaatgttggtgtgtggttgtctctttctgtgccagccgctcccatgagaggagcctctcattgccgggactttagtggctcgggacagtgccccatgagcgctccagttaagccaacagatgggtacttctaggctggaggcactgcctcgccagggcagtatctgctctctgtggatgtccgaattctcacgggtgggctcagcgagacagtacgctccatgtgacccactctggtctcaaaagctagaaaaatgctctggaaggatattgaacacctatgtggggctctgtggttcaggttaggttactccattagatcatttgtatctggaaagaacagggatggctccaacactgtacaagcctgcagtcctcctaaggctaaaagacacaaggtggtacccgtgtcatggtggtgggaggttaaagattagtgtttgtgtgtgtgtgtctgtgtgtgtacatgtgcacgtgtgcaactcttgctttgtgtgtgtggcatttcactttcctaatcaatttaggcaacctgttggggcttcggaatagtgcatctaggttggaagtatctcccagtgaatgggtcacactgtcacactgggcttccagcagaccccataccacccaccggtgaaacttgagtaaagctactctaagaatacagagcattggagaagtgctttattcggttaactttaccaccaccagggaatgtctgggttgttctcaatgatcagtatgaaggtctgtggggttgtggacacattcagggttggactggggttcgtattagtcagccgactgggtatctttattcacagaagaggcaaaattagcaaataaccccatcaaaatcatcttgatagttgttctcaccaaggttgctatcacctctataattatgaaaatgttttatgaggtaggcttgggaatttgaacaccttttgagaactgttgggaacaaccttctcagttaagtaaagaaactacttaccagaaaacatgtggaggacactggggtgataattcatggtcatttccgataagctacttctagggccagaatctctgctgaatctcagcttcctgatttaatgaagacaaggaaatgaaaccgccctgccgactgtttgtgcttttaataggccgagttttcagaaagagaagacagttaaattagttttcctttttgcccttttcattctccctgcttctgtcctgcagatcaaggcctttgaaaggaaggggaagaggaagtgttttcttgcttagtgaataggatgcacctgtcccctgaggaagattccctgtgtgtgcttgtatgtaaatgtacatactctcttactgtcctctttttcctcctcacaaatgtaagcctgtatgtgcttcatattaatacttggcattcccatgagcctgcaaagtctggagggagaggccaggcccgtgcttctggccgctgtgacccagcacctggcggaggccctcactgagtcctgtcccctgagtggaggtgaaaggtagacaaggaagaccccacagttggagagcctgccatggacaggtcgcgcattgtttcacttgggcctggttgagcgtattactgggagtgggggaagttgacgctgtgacgtagtcctggggcgagcttggaaggtgctctgggcttgtcagttgacagtgtgtcattagggatatgagcggcaatgcgatgtcctcccctgcaaggaaggagatgtttcagacttaccattgactgaaacagggagacgagtgctctctcatggaaacaggggagatttgagatcagtcacaaacacttaccaaggcccaggttcagtccactcctggagctttgaggggctagtgtgtaaagggcacagaagcccttttgctaggtgcactggcctgagagcttcgaggggatttgccaatgggattgtgccacaatttttattactttttccctagtcttcgtggtctaagttttgttttctcaatctttcttttctcatcttccttgtgtggagttaacttttaatcagggaaagggaatacatcgagctattgatgaatgaatcactggagaaaacagtgaagtgggatttttatttcagggtctcttaggtggcagtgccgggtgacaggtgggggtgtcccttgtcttccattgtcccggagactaaccatcagcctctacctaattgaatggcatttttatgtgtttttcatgaacggtggtggatggagatgtgtggaggactagcagctcttcatgctggagggagttattccgcctctgctctcagacagcctgtgaccaggcacgggtcacattgctgccctggacttgcactgtatggcatttgaatgtcatgtaggggcaccgtgtatttcagtggctgtgtctaggcagcccgaaagccactgaatccctcatgtccactctgcagccgacattcactcagcatcctggaaaagtgcccactggggcaggagcttctcttgctcatgtggacatgacggtaagtccttcttggagaggcagcatcaagtcatgttgttcgttctgtggccaggaggtacaaagtcagctgtttctgcttttaagtgatgtgggcttaaggaagagggaaggaggaatgaaggaaagaaaggaattgaggagggaatgaaagaaggagagggagggagggagaggaagggaaggagggagaggaagggaaggagggaaggaagggaggaagggacggagggagggaggaagaagccccatggctttcttgtaaatagcagctgccctgaagtctgtgaagggcacaccaagagtctggctgggaggttgtcagctaggaaactgtggcccaagttcgtggtgagtgaggagttactttcttcccttgaccactggagcaggatagactctgcctgccacccatcccatgaagaagactttccttctgagtgccttggtttgcgcttcagggaagccactgacacgttcattacctgtttcctgaagtagacagttagagctccctgtctcagtgtccaaaaaaaccaaggggccccaagtgcagaaacaagggctgaaaatgtatgttttacggacaggagacagccagcctgtttaagtggaggcttttttggaaaccccactttcccagtgagtcacagtaaacacagacagagcacactgcttctctgacaccagggccagggctgtcctgggctcagaatgaattagaccagcttgccttttgtgttcaccattctagcatttctttccctgcttgattgtcaccacatgtgcacacacatacccacatacctgtgcacacatgtacactttcttatttgctgaccctcacagccctgccatccctgggctaccaggcagactttctgatctggagcttaaccggcccagacattggaaacaccaagcaactggtagctggtaagacttttaccccatcaacgaggcttacgaaagagtaaacttaccttaataatgcctagtggccaggtttccaggagtgggggacagcctggcgctgtttgtaggggctgaagggaatgtttactgaggggatcctgatgcagtggccgctgtgacagccagtcaggaggtcttgtccccattctaaagagcgagaaactgcagagttgagaggaccacaaaccctagtgcagccgggttttctgcaggggtctctacagctcagagcctctaggctttgtcacctcctgggtattggaggcttcctcgggccctcagcacagcccacacctaccagggccaatccaatcatgtaggctggccagggcggtgagcctccgaacaatgtatgggtggtgccaccaatccttgtcctcactaggaatccagtcagtcatcccgcaattccccaggccgggccacagctggctgtgctcctaacatccctgcactgaccagcaggtcaccggtacctctaggagcctgactgtgtggcagccgtgtctgagtgatgactgccagaaagttctggtttgttattcagacatataatacgtgctgctttgaagacagtggcctgcactgctgttgtccttcctaataggggtagggtcttgccaggtcagagcaggacccatccaggggcagtgacctgtgctgatgtccttggctgtgctggatttgacgagaacactctgtggtcaggggttttgcctttcagctcgagctgcagagagaccctctctgtcctgctgcttccccagattctgcccacggggcatccgcatgccctctctagctgggtgaactatgtggggtcagctcactgtgtaggctgcctcgggaaggagggagagccttgtgctgccagggccctagtttccatttggcttcatcagagagtttctgacacatacctactgccagatcacatgtaatagctgcaacatgccacgcggcttgtggctgaagttacttacaaaagccgggttgaggaatccataaagtgtaggcttctctggccttcatgggtcggattaaagggtgtcctggccctgaggagcacccagacctgcagctgctgctggctcctgaacaactggctctgagtgtgcagaggcctggctctgacagttgagcctacctgaagccctctgagaccaccatccagagccggaggcatcctacatacctgcatgcaaggggaggctgggcctccaggtctactctgttgtgatttctgctgggttgtgtgacggtggtgcattggctattgtgggcctgttggtggactagagtccttgattttccttctgtgcaaagtcaggactctccggggcccttcatgccttaacatcccaagaggcttgttttgttattttcttccacaatgccctggagttaccatgtttgggcggcatgttatttatggagaagttggtgacagggagaccctgatgtaacttgaattgtgataatgtctatacttgctctcacggcctacggaagaagaatttgtttttcttgatttggttcttttcacttctttttcttcatggaggcttcacgtaggtgcatgtggagggagctttattcagacaagtttccttgacatctctgggaggtctctgtttgtctggctctgagagcatctggtgtttggacagcctctgggccgggcgctgtggggatggctctggaaactgtcagtcatgtgtgtgctacaccgtgcacaacaggggctctgcagatgatatccatgttctcagacgcccaggggttttctttgcttaggttctcttttcttctccggccagagatatcttttccaagtagtaattgtaatttttttggtggagggttatttgtgatgtttatctcaaccctgggaatacctttttgagagtagagaggctctctgggatcttttcattttctaaattctcagtgtatttagggaataaatgcattcccgagactttcctggcggctgttgataagcctgcagtgcactactgatggttggcagccctgtgatttaccgtcctctccctagtggaaaaccatgcaaactgacgcctaaacccaaggcgccatgcacagtcactgctgatcccaagtgctaggcaaggcccaggtgaggtgagtgagggagacctgtgacccgaggtcagggagctgcatgtgcccttccaggaaccaccaaagcaggagagcaggtgcagttggcttggatgggttcagggccagagaaaggtggagaaagcatctgcctcccagtggctgtatctgggttttaattccagttccatacttaccctctgtggagcttagcactttcacttgtagcgtgggcacagggacaccttggtcataggcaagagggctcccgatcttgtatgtggagtgcctgatgcaggatctgactggtgaggtggcccatggctgagagctgacaggctgtccagggccaatggaggcccatgggagaagcggcctgcagagggtgaagagaagacttgcaatcttatggcctgatactgtccatgggcaatccagggacagaaggcacggaaacttcaggtgaccctagcgtgtgtctgaaccaagttcctaagtgcatggtttcaggggagggacttcttcctcccctacagagagtaatggaaggtaaatggttgaagccaggcaggcaggtgacttcagaaccccatcctgcctctgctgtgagaggaaggccactctgtttacaagcagtgaggctggactgtttgaggtgttctcagccccatgtgcccttctctggatggagagcctttccctccctttagagggcactgtgtctgcaggaaggaggtcagtagcatgagcacttggcctgaagtgtcttacacgggtccatttctgccaagacgcccaatgggggcccaacagccaggcccgtgagctagccttctgttgtgtggacacatcaacatttctggctctgtcacacaggtatggtcagggccctttgtagttgcataggtgtaaagcgagggccctggctgatggctcttcctgtcaagcagaacaaagcaatgatgtggaggtgattgtcccctccccagggctccaggaagccttgatccgcacactgtgctgaacagcacacagcaagagctctagttaatcatgaggattaaattgtgtttgttttcattgtaattacagcagagcagtaaaatgtgcagtctgtggagctggacaggcagaggtcaaggatgtttgcttcttggctttggaggtgtcagacgtgtgtgaaatatgctcagcctcccacctgtgtgtgcagcagccaggcacctcccatctcccagggacaaacacaaacaagtgcattcgaagggaagggtgtgcccagaaagaagtggcatggggctgcaggtggtgttcagtgttcattgagactctgatggctgtgtgctggccaggccccatgacgacaggtaaagcttaggactcttattgaattgggtgtgtatttaaaatttggctcattgagaatcagtgtaatcggcaggcatttcaagcctttgtcatggatttatacagtgtttgggaggtgggtcaccctactggtcagcctccccaccccttcacttatagtagggaaactgaggcttgccttttttttttaaatttattaattgggctctctgctgatacgagacatgttgatgcattcagtgtggtgtgtattaagatctttactggatgtgtagcattccacttcattacatcagaggaagggccacaaagctctataaaaccaggtcccctaagagtggctagagcaggagacaggtcggtggcccggctgctgatgcaccagccccaacggtgccagcaagcatgagcaagcccacaggtgccctcggcctcagggcaggaaagccctgggaaatgcttattattacagtgctggggtctttcctgttatggttacagttgtatttgtctaacagtcttatttaaagaagaccaacatcatgattctgcatttaaccatctgaggcttgaaagcttggagagaaaccagttgtctaagtggtttgtaaatgggagagataaatgtctcgagtaaccacggtggaaaagcaccaggagggtggtgctttcactgtacctgggggcagccatgctgattgcaggagctttggggttactgccttcaaactctgctttcgatgccctgggaacctctcatggtgcctgtggggtacccaagagcccataggacagtgtccggaggccccactctctgcagccaggtaaacctacccaggccctttccttgcggcctcatccttcaaaggttttcttgttttattattttacgtaatgttgtttcttttaaagaagctgagaaatgaaagagcaattgtatgtctacaacttttgtgatattaaccttattttgaatttctggtttaccccatttgtgttggtgcattcaagttattatcaggagataattctttatccgcaaatagctttgttctcacttacctccttggttccattattggaaaatatattacatttatatatgtaatgggcccaatgataaaattatatttttattttcatacaagactttcttttttcttttttatttttttgagacagagtcttcctctgttgtccaggctggagtgcagtggcatgatcttggctcactgcaacctttgcctcccgggttccagcaactcttctgtctcagcctcccacgtagctgggagtacaggtgcccgccaccacacctggctcgttttttgtatttttttttgtatttttggtagagacagggtttcaccatattggccaggctggtctcgaactcctgaccttaggtaattcacccacctcggcctcccaaagggctgggattataggcgtgagccaccacgcccagccgcaatcactttgttaaatgagttaagaacggcagagacatgtgcattcatactatcttttataatgacccggctgtctttactagtgctctttgtcattttatgttggtttaaattattatctgtggtcacttgattttagcctaaaaaagctttcgttgctattttctataaggtgggtagatcaactagcatcagattttctcagtttttgtatatctggaatgtgtttattttgtctttattttttataggtagcttttctggttgtaaaattcttgattgacagccttcaatcaaataagtaatgaaatagtagctagaatatggagactttaaaatgtcctctgtggattagggggctgatgcatacatagaaagattgattctctcagttttattcctggggagccaggtagagaatttgcttttaggaggtggattttcattccttgagcaaagctaatagatgaacttagctcattctgccaggacagtctgtcagtggagagactgtactattaatagaaaggaatgtgaggccgggtgcggtggctcacgcctgtaatcccagcactttgggaggccgaggtgggcagatcatgaggtcaggagattgagatagacctggctaacactgtgaaatgccgtctctactaaaaaaatacaaaaaattagctgggcatggtggcgggagcctgtagtccccagctgctcgggaggctgaggcaggagaatggtgtgaacccaggagacggagcttgcagtgagccaagatcgtgccactgcactccagcctgggcaacagaacgagtctccatctcaaaaagaaagaaaggaatgagagctggacaagtcattccctggtcaggacactccagaagccctacatggtttgcaaaaccatctgggctgttccagctcctccctgtctttaagctacagatctcagtctgtgggtgctacctgtccacctccccaggatccacctcgagtctgtgggtgccccccatccacctccccaggatccaccccaagtctgtgtgtgctccccgttcacctccccaggatccactccgagtctgtgggtgctccctgtccacctccccaggatccacctcgagtctgtgggtgcccccatccacctccacaggatccaccccaagtctgtgtgtgctccccgttcacctccccaggatccactccgagtctgtgggtgctccccgtccacctccccaggatccacctcgagtctgtgggtgccccccatccacctccccacgatccaccccaagtctgtgtgtgctccccatctacctccctatatgtcctgctgggcttcttacccttagaggtgctcgatagatagaagatggcaaagtgaatcaagtctcagggccaaagccaggctttttgtaagatctcaaggcacgatttaaaaccatgtgcatgagctgacagttggatgtcaggaggtcaggagtctaggtggtggtgaattttacaacagagatgataacagcccctcccactgagcccagtggatgctagatgtttccgtaagggctttctgtgtatccttagccagtgcccttcccaggcccactgggcgggcatctcattcttctgagggccgtggagtctggccatcacctaccgtgcatgccgcaccctcctgaggctttctggagtgtgctattttccacttcctgttggacagacatcttaaacatccttatgtttcccagacatctcagtctgccttcctagcataattcttcttgtaagaaatgtaggattttgtgggtggcagggggactagggaacatgcatcagagatagccgcatgctctgtcttagaggcatcatcagcctggggaacctggccagctcttgtggaccgcagtctaattggcctgctccctgcagagtgagtgggctgcttagactttgcccacttgaggcgttgcgaaataggatggtgtgtgttttatttttttttccttgttatttaagaaggaacattgaagagagccaggagggttcctagtggaaaggaaggcagggagaacagctgcacattaggattaaagggccaaggcaggacaaggccaggggagctctgagggcagctcgtgggctgtgttcgccaactgctggagatgggtgagatgcggaaaacaagcaaaatactgcaaaatggaagaaaaattgacctttcctgttatccattctcctcacagtttatcagatggtggaaggaaacactgtaattctagaaataagccccaccctgacagtgagcccccacctcccagcgtggaaataacccattcagggcagtggcaccctgctgcccacccttaggctgctataggccagtataggctggggtccctgcaagcccaggtctccttcagggcaggtgtggctcttcctctcccagatgactcagaaagccccccaggggcctgcatgggtcctgccaggtggccaacgctgaaacagaatgtgtctttgatttgggttgaatttatagccacaggtcatctgattatagtcagaaactctgaagggaagttgcagggtttttatcaataaaaaatgtttaatttaaaaaaagagattggcacataaaagcttttaatatgcagggttgcaagggcagagagaaataatgagaggtcctgggtgggtcaagggggtggacaccactgagctggggcattgagaccctgccagcaccagctgtgcccagtctgaagtttcagagattgaaggaaacttgaaattacccaccgagccctggagaaatccttgggagcccagacatttgcttatgtgcgcatgtgtgtcatgtgcatgtgtgtgtattgtgtatatatgtgtattcggtgtgttgtatgtgcatgtgtgctgtgtgtgttgtgtatggtatgtgtgttgtgcgtgcatgtgtgtgttgtgtgtatgtgtattcagtgtgttgtaggtgcatgtgtgctgtgtgtgttgtgtatggtgtgtgttgtgcgtgcatgtgtgtgttgtgtgttgtgtgcatatgtatgttgtgtgtatgtgtattcagtgtgttgtgtgtgctgtgtgtgttgtgcgtgcatgtgttatttgcatgtttgtgttgtgtgtatgtgttgtgtgtgtgttgtatggtgtgtgtgttgtgtgtgtatgtatgtatacacaggatccactctgcatctgacaagaggctgccccaagcaggagtgtcctccgatacaacaagactcgcaggaacaagtctgaggacttgacaagggacacctatgtttgggagtggtcccagaacggtatccttaatctgccccttcactgccttcaactctcattgttctcctcaatacagtgaagtccttaaaccactggtgacaccagggacgttttgtgcctgatgcccgtcaccgagaccttggagtgcagagcagggctcccctcagggcttagctcagcagagtcctcagcacaaagggcagctcaggagccagtgctcagccacagattgggaaggcttctaagccgtagtcagtgggcagtgacacggcccacgcttgcttcattaacagcctaacaagagacaggggtgagcgtgtgcccactcgcacatgcatgagagagccagggagggagtcacctcatgttatttaatcaccctccaaatattcagagctggagaccactgctgcagaccgcctcccactaaggacaagctgatgtatgtccctgagcaggagaggatgtctgtgagctggcttatttacaaatacgtgtaagtggcagttcttaatttgcaaatctgtgtctttataagacttgaagaacaaacaataatacctgcagacagaggtggataaaagcattgctcagtactgagatacattatcagtgaaggcaccctgaatgcctctggtctctgatgggtatcgctcagtaatcagccagggaggtggtcaaacaggatgggagttgcttccgatcggtgatttccccatgtgtgcttaggtttcgtcatattttttaggaatctcccttcctctgaataggaagtgcatgtaaaggcacacaatggaaccagacatagcttcctgttaggtctgtgggaggtcatggctggtgaaagggcaggatccaaacacaagcataccaggggaagaaaacccaaaaagaccccaaaggtgatcactgtgcgctttgtacaagtgctgagcttgcccgaagaaagaaagagacgcaaaagagaagcagcactgaggaagcctggctcccgggctgcttttcataaagacagagtcagtgttgctgagacacaggtggaaagtctttgtgcttgcttctttgatcagccccactcccttccaacagagcctatcaagtttgcttcctaatgagggcccccgagtgccggctgtgatgggtggaccaggctgagggagggccgggagccaggggagccactcccagctgccacccctgaggtctgggaggcaggagccccacccgtgatcccctttcccttcttttactctcccttccctgtttctcagtgcatgtcagggaagcatcagacagaacacagttctgcgtctgtccctggagcgaggccgagtcaagccctgttggggagggagaggccctgtggtcgggcaatggggccaggctcctgctggacagaggttgcttgggaggccactgaggggagaaaggagctgctgcagcacagccacactcctgggcccctggacaggacaggatgggagaggacagagcaccccagctctcagccctgctgcagttgtgcgggtgaaacggacatccccactaagggtccttggactctgtgtccagtccttgtgggtgagggggtcttccagactgtcccctaatcccacctggagcccagagaaggggccgatggggaggaaggggctgggtggctccactcacctcctttggtcgtcacttttgctgatgtttgtgatgttaaaagagatggaggggatgggcaggctagaataggtttatcttccccagtggtttctgtgtggaatggaaaaccctgagccctgcctgctgaagtgaggtgcggccccttctctgggctccaggtgggattgggggacagtctggaagaccccctcacccacaaggactggacacagagtccaaggacccttagtggggatgtccgtttcacccgcacaactgcagcagggctgagagctggggtgctctgtcctctcccatcctgtcctgtccaggggcccaggagtgtggctgcagcagctcctttctcccctcagtggcctcccaagcaacctctgtccagcaggagcctggccccattgcccgaccacagggcctctccctccccaacagggcttgactgggcctcgctccagggagaggtcccccactgaacaatttttaacttcaagatggtgcagaagcgatacacattcagtagaatctttactttgagttcctacacaatcactctatttttcactttcagggcagtgttcaataaactgcataagttatttaatactttattataaaaaaaaaaaggctttgagtctgatgatgtcgcctactataggctaatgtgcgtgttctgagcatgtttaaggtgagccaggctatgctatgaggtttgccaggttgggtgtattcaatgaatttcagacctaatgatattttcaatttatgttgggtttatcaaaatgtaaccccattataagtcaggaagcatctgtatctttttccgttttctgggggacacaaatgtctgaggaggaccttctgagccctaagacatgcccaggtgatgaggcttgaggacagctcctcccaggcacagccctttctcttgtcccgcactgtgctctgtccatggagccacgaggcacaagggccgcacgtggattttgtgctgagtggcattggaagcgtgggcatcataggcagtttccctgggggagagggaccacaggctgagattcctctccaaccttcgccctgggagcagctactgtgatagagccagattcccaagttctcattcatggtattttgaaatgacataaagggactgccaccaaacaaggcaggatagcagcagccaagatgggaaaaccttgccttccccccgggagaacagagggagcctccccacacaccgtgtaatttccagaaaacactggtgcttctccatggctctgctggccgaccacatcctcctaaccctttaagaatccagcccccctttcttctgactttaagcaccaggtagtgcttaaaagatagttgccaagccaggcgtggtggctcatgcctgtaatcccagcactttgggaggccaagtctggtggatcacttgagcccaagagttggagactagcctggccaacacggtgaaaccccatctctactaaaaataaaaaaaatagccggacatggtggcgtgtgcctagtcccagctactcaggaggctgaggcacgagatttgtttgaaccaaggaggtggaggttgcagtgaggtgagatcgtgccactgcactccagcctgggtgacagagcagccgggaggggtgaggggaactgaagatagttaccaagatacttgtgcattttaggaattgggaccaagactccagaatgttcgtgtgctcaggcatttgttcattacatcatcctcagtcccagtgtcccctcatcccctcccaggaaagcaaaacgtaactactactaataagctggttgtacagagaattcctagctgtacagaaattaatgaagccctaggaaagagaatgtgatgaaatacttaatagattgcgattgaagccactgtctgaagctgaaggaagcaggatgccgtgagcttggctgccgtggggcaggggcaccagtccctcttctctacccaaccaccctcctcccagcagtctcagcccccacctgggggtgttggaggagtgtttggattgatgatcagcaaattggggcagcatgtggcctgtcacaaggaagatctggggggtgaggatgctggttaggctggaacacctgaagcgtaaccttaaggcgagtctgtggttgcctgaggtggcaagcagccctgttggagtgccgggcatggggaggattgccattcagagtcagaaagctgcctagcgggataggcaggctcatagagtggctgtgattcctgctgtaggactggctgagggtgcctgcagctgccacagggaaggaaacatttcttcttgtttccactgcctgagctggggctctgagccactggacttaatgtggacaggagggtgagtagaacccatccattcctctgtgatcagcggtgacagcccggggcagtgtggccgtttcaggtcaaagcggacttcatcccaggaggccacgggtgcagggcatgacccagagatactgggtgctaagcagaggtatgacataggtgtcttggccccgtatctgggccacgcaggtggtgtctggagcatcctttggagaccgttcctggactgttactcctcttatgtagattgacctttctctagctggggatgttgggccaggcatacctgcccatggaaaaccaaaactgttacagacagaagtcacagtgacagagcgttggtaggatggagtggccagggaacctgtgagaggagcctgtaccgacactgcctgcctcacacagcatcaggagggagacaccagcggggccctccatggctaagtgggttctgcttctgaattgcaatttcttttatatgtttattccattttctgggtcacccctcattgaacatttactatgtgcctggtgatgtcctgagtatacattagtctaaggcggagtcagtgttgatccattccaccccagctcaagcacccagccagcgaacggggcgaagtgcaggcagagagccagaagcagtgagggtgtgtgcttggcttcctggagtatttgctaatgagcaaaacaaggtttgccggcttgaaatggaaaagcaacagggaaccaggaatgaattgctccagaaaagccctggccctgcacccaggagtctcctaccttgtttggtgtgaaatctgtaaacatctccttcctcagagacacagctcctcccaggaggaacctagagggatgtgcaaagaaaatctcaacccaaaagctcaaaactgtagagtaaaaacatttcacatttggcttttggagtaagagtttttcaacaatggatacagaccatattgctgttcactttcccgtaaatcaacgtgagactttgctgtcagccaacatgacagcagtgaacagagcccagggaacccctcaaactcaagatagtcaagttgtaactatggcatcccagccaggaccttctggagtggggaccaacaatggggtgaggccccgtgtggttcccaggatgccagaagccccatatccagatacgtggtgggtgctgcattgtcatttaggacgaagggcccccctctgccaattcactgcctgtttgcacagaaagtcgtgtgtcctcagtattggacttttgtggtatcagtattgaggcccacaatgtatctgactatctttaaaatgctgtacaaatctgaattgaatataagtatcctataactggagtattgaatgcggctagaatcatcccaaggcagaattgagattctaaccgctacgcacacacactcacagccctggatcctcctttgtgtgtgttctttcaacatggtgatggataattttcagaatggggtctttgggtacatctggtatgggtgaaccatatcttgacactgagtgacattggggtgctgccctgtcccatccctgtgtcatggccgggcctcctgcccccaccactcagggcagcccgtctgcctctggccagctgtcggagctggacttatccctccctggtctgaggaataagatgtacccttgggtcagaaccccccacagccctctgcaatgactgtctgacagcctttttcctagtaagctgcttcttgcttgtctaggtgaaatctctagcaattgcccaaccaaaaactgggtcttggagctgatggctacacatcccctgagggtacctctgaaaagcaagaccttttgaaggatggaaccctgaagagctggtgcagaagcaggactgtgcaggcaccatgagggcaagcacgaagccagctgtctgcacagacccaccagcatcccgcagctccacactgctttcctggtgtgtgggacgcagggagcccccttcgcctctaactgtgtgctgcactcacaggggccgagtagggtgtgtttcttttggtgatgatgtctacttgggctgaaggctcagagcgctcgttcctttggagaccctgctgcaggcgagtggtgagcacatgcttccgcacagacacagctgccaacggtcctcctccacaccagcgctgagttgtcatggagacaatacaggctgggctgtgtgtggtcagcagaggggcactggcccagctgggtgggtatgtgagaggatttatgaaccagcatcaatgcatctcagttaaacagcccccggtactgccgcacacgcaggacgtcaggcttggtgtgtgtgggttcccggactggtgttctgtcggcaaacgttctctaacatccctgacccggttcccttgtcatgccaagacagtttcctagcagccttaatcatgaaaggaatcacaaaggacccgtattttttccctattaagctactggaagaaattaaaacagggaaagaaaatggttacctttaaaaagttggttttaattttaccagtgggagaaagaccagtagtcaaatagaagttgtttactgagtatttcgggttgaagagatactggttcttgatgaccatctggatgatttaggatgaattttaaaatccgctgtacaggaaattaaggcagtgctcattaactaggaagatcctaggcctgtcctgagaataattgcacagtcgtctgttcagtgctgcctgccaggctgggaaggcacatgtgtttctgtggatgtatctgtggggcactcagggccctggaggcagagtcttcctgagcttgtctggaaggagtgcttcccttggtcatcccaagctccattgagccttaacgcatggatgaggggggaggcaggtctccaaggggaccctgagacccatgcctgcccccaggaggtgtgcggggctgggcggaggaggggagaagggagaactgagagcctgcagcatgtgccagtggaggaccaggtgaatgcagaccccactcactgggcacgtgtttagtgaatgcatgtgaggtgccaggtgtcttgtacagatggggagttttgtggtgggacaggcttagagtcctcctctgctagagcttatggcttcatatgatgatagacattaaacatgcgcaactgctgatggggacacacgttgtcagggacgcatgagatctatcacgttgcagggtaggagtcacatttagaaggtcatagatgtccctttcatatggtgacagggtatgcaggttgtgactgaaatccagatatgctgcttgagaccaggctcagcatacatgctgattgcttataaaggggttgcttgaagtgaaaggaaacaagtaggctgctagatgaagaatatgggctctggtgtggtaggactgggtttggtgcttgctttagggctatgtgactttctgtatggaaaatggaatactaattatgctggcaaggataatacttaccatagttctgggcttataaaagagtgccagtaatattacctcctatgtgtgattattattaacattactgctattttattatctttattgtcatgtcaaggaaaatcatttgtggtagtatgtcaaaggcaacttgtagttctggaaatcttctaggatctggatttcttagaaagttaaaaagtcattattccttggaacaaacattatggagatttgagatttcaagttcattggtcctaaacatgttatcattttttttgtatatcaaaagtgaattcctaggtgtgtgcccaaaagaattaaaaaacaggtggtcaaacaagtatacaaatgttcatagcagccctatttacacagtagcgaaaaggtgggaccagcccaagtgtctatcagtggatgagtggataaacaaaatgtggcctgtgcctgcaatggacttttattcagccatcaaaggaaatgaaattgtcatatatgctgcatcttgtgtgaacctcaaaaacattatgctcaaaaaaagccagccacaaaaggtcacatattgtatgatttcattggtatgaagtatccagaataggtaaatccatggaaacagaaagcagattggtggttgccatgggctgagaagaggcggcaatggagcagaattacttcacgggggtagggctttattttggggtgatacaaatgttctgatagatagaggtcgtggctgcataacattgtgaatgtagtaaatgccattaaattgttcactttaaaatggttaatttcatgttatatgaattttgcatcaataaaagagctagttctaagcaccatttatactgtaatatttgtagattaccataatgtaaaattgtccccaccatataaaaatgttctagatagaggtagtggctgcacaacattgtgaatgtagtaaatgccattgaattgttcactttaaaatggttaatttcctgttatatgaattttgcatcaataaaagagctagttctaagcaccatttatactgtaatatttatagattaccataatgtaaaattgtccccttagaacatctcagaacagcttccaccattaaaaaaaaagaaaatgtgttccacgcttgtctgccttattatcaccacagcaagagcctgaggttgacctttcatgaagctttgcacaatcatcatgaaatgtggtttctcgtactttgctgcatacagtgaggccccgcagaggctgccacgtgagactgatattcaccctaccctctcttgtgatccagagaagtaggagagcctagaggcacaccaggggaaatcagatcaccaggcttcagtttatatttgtgataacgttgataagttgctcagagccctgcctgttggttagtgtgatgtggcctgaggagggttccgtgaccctccattcagttggaccgacaccggaagtctgctgtaggccaaggcagcagcttaatcagggccttatttattgattctgggttgtagattgttcccgatgacctagttgactagaaagcgtcacaggaaatgtgcaagttggctgatgagcactcaaaagagtgccccgcacccgccgtgcttctgcccttttcctgccctgcctggggaacggttgcacttccaagttcaaggattagctgaggttgtctggatgcttgattagcgcgtccttttaaaaggttcattcctcatctcgctgtttgccgggtacccttcctctcccggacagccgcacctgcttccctgtgctaatgacagtttatgaagcgaggcacagtgagagggatctgaagcgttcgcggggagctggtaataggatctaggattttcccttcaaggtcggttggttttttgagtccactctaggtttatggagaggaaaattcattataatctgacattatttggctatgaccatggaatggatttatagcccacgtcatgtgcagctgggtgaggggagacgaacatgcccccatttggtctccaatcctggagaggatttcatggttcagttggcagagaggaacccagcaacccttcattcaggaggcagtgctcttcccaggaagggggatctcggacccagtgatggtagaaggcattctttggctgaacccacgagggttcgagttaggagcaggcattcaacttaagacctgagaaaacaccagcgttctcccacatcaccatatgtgtgagtctgaacgtccctggaggtggcatacgctcatgtcttagaagaagaaaaagttatttgctctagaaaagggtcacgattagatggatatgggatttgtcctttgagctaggaatggcattgatggcaaatatgtgtcccgtagtagatgtagcagctgtcactgggtgatggcctgagagtgactgtcagtccaggcccgtctgaaggctgtgactgtcctccgggacccagggagggcaagaagctttagcccaggtgtcgctgcatggaaggccttgttcaagccacttagtgatgtattttctcacctggaaagtagatgtaatagtaactggagaaaacttgtgtttcatttgtatattgtgaaactaaatggcatgcttattattgttttgccatggtgctttgggctaaggcgctggacaaatctgaactgttaccagacaaatattctaagtcagatagagaccctttttggcttgttttaaatcacattattccagcttttgtgatacctcagccttctctgttgttttgtttctagagaaaacagttttgacttacatatatatatactacctttttcctaaaaggatctaaggggccttatacaaacaatatagttaagcaagataaaataatctaaattcacatggaaaaaaaaatgagattaagagagtagagatgaccaaggttcatgtttcggggagggtgtaagaaggggagtcctgagctgggggactcggcttctccctgaaaggagcagtgggcaaatggacagaatcaacagacttccctcgagcacctgtcaaatggcaggcaccatgctctgtgctgggataaagctgaagtcagccccacgccggcggtccctcaactgtccagagccctcaggactgtaggagggggcatggggtggcaggtcagccttctgtatcttcattacgtagttagaaacagttcccagaatttcagtcgcatctgtgcctggtgtgccctgcatttcggatgtgtcacacttggcctctccctcactgtacaggaacctggatgtgactctggaatcaggatcactgaggtttgcagatgatggtttgattggattttgaaatgattattttctcagtgtcatttcatttactgctctttatgtgaccccggcctcggtgatggaaatcaactttgtgttctcaattactacgactgtataatttcataagatttagtatctcccgtgaagagtcctacttctgctaggacattgggcagctgctgcatctccgagcagtccgtggaataccaagtgacaggcgctggtccgttgaaagtgcctccctgagacttacgtgtacactgtcgttatctatcaccctgcactcctccgcgtgcgtagctcagaactgactctgaattaaacaggcagtgcttgggtttggatgtcctctcccactcagggtgcctcccattcatgaggagccccaggtgtattgtgacaacaagatcattaccacaagcgtggctgtgggtggatgtgtaggttttgggaaatgattacttggaaaattaagttcttatacctggcagtcttacctcttaaaagtggagaaacagtggccaggtagactttgctgtgaattacaagggcatttcttctgctgaaaggcatttcaggccgggtgtggtggctcacgcctataatcccaacattttgggaggctgaggtgagaggatcagttgaggccaggagttagagatcagcctgggcaacaaggagaccctgtctctaacaaaaaaaaaaaaaaaaaaaagccaggcatagtgtcatgcacctatagtcccagctactcagaaggctgaggtgggaggatggcttgagcccaggaggtctaggctgcagtgagccatgattgtgccactgcagtccagcctgagtgatagagcaagacccaatcttaaaaaaaaaaaaatcaatttcagtaattcaccaggactattttctctgcactcctttgtggaggatgtttccctgagcccacggtaggcactttatcggcagggccccgtgcttcagccaccctggtgcacacatagcagcaggctggtgcccgtaatgggggtgggcccaggggcatcccagtggggcttgccagtctgcagtggtgatgacacttctgaaggaatgggataatttcatctaacttggtgttcagtgttgtctgttcagctaaaataaatgtgcccgatgaacaaagactcatggttgatgatgaggcacaaggattcagcagaagggacagccaaccctggggttactggaatgtcgggccccaatgtcactgcatagcaatgtatcccaggagtcagcggcatataggataagcacctgctattcacagtcacttgtgaacatctgcctggcttggcttcaagctttgattaggtccaggtctgctgaattttaccttctttggaccagcagcttccagagccatgtcttcatggtgaaaggcaagtccctagggatgcaagcccatctgtacccaactgaaacccatgttacccttcacctgtatcttgtttgtgggtattgcatcggccaaggcaaatcgtggggctaagcccagggtcaagtgtggggacgtgcactctgcagaagtggagggtggggatgagtgtttgctgggcagtagtacacccgaggctccgtgagaatgtctactttgagcagtcaagagaagacacagattttagacttgtaggtttcctcattccaaagttggtgtgcttgtacttgattttgaagttatctttcttccagggtgatgggggagcatgaaagtaagaggatcttgggaactgctgtgcccattaattttatggcaaatccacgtatcacctggaaaaccatccatgggatattgagtagtggaccaagagctgtggtccggattccatgcatacgttttgggaagaggctgacatgaagcgtgctattagcttgtcgagagccctgctgacttctgaatgtggcttagctcctgccacgtcctttgttcttccaaggttaactgctgcaaagggattgcagtggccagtggagggctagtgaaggttcaagcacactgacaattaggctaaatcggcagtggcaggttcttgcatggaagttgcatcacctgctggagtgactgtcccttgacctcctcctgtctactgggtcttcctccacctcactttaatgctgctatgctgctaatgtgaactctgaggctttaactggggaagtcgccaccgccccctccatcacccttgtcctacaggtcagggctggaatgaggagcacttgcagttgcctagtgggtgggatttcaaggaaacgggatacctttcttccccaccccttcaccttttcccagaaatggtctcatcactgtttccttttggaattctgtcattggaatttcctgcttttgcagctcttgccagcttgcgtttcttttgaaattcagtacgcttgggagcagtgacgcgaaacttcgcagacgctgacctcgctgacagagccaggccgggcaagaagaggtccgggaggatctatcaggagtgtgggggctggtggggcctgccctgtagcgaggcttagggtatgggcccctggggggtgagagaggacaagggatgagagttgggaggtaattggggggcggtaagaggtggagggtgaggggtgagagggccccaaaaacacaccccctgggccacggtttctcttaggctgtgctgccccagggtgggagtagaggagattctggacttcagaatgccagccaggctcccctcctatttttttcgatcccagagacaacagagttctttttttctgcatgttttttgggggctcctcttttcttgctgcaatgctgtcagaatcataaagagctgacatctataattaatgtcagtggcctgcactagtgaatgcccgtggcacacagaacacctggctgtggagaagcagcagcaggacctagcgtgttggcactggaaggaaacgcagaggcctttcccctcattttacatgcaaggaaactgaggcccagagagggggccccacagccagccagtggcagtgggctctgaggggctctggacagcagcatcccacctgagtgcgctcttggctaggcagggtgatggggccccagtctggtggacgctcagcaataggaaggggagcggtggggaatcccttctcgttcccgggtgctggtctaccagactggggctccactggggccatggtccaataccagtcctagcagtcattgaaatatggggtttcaggctcctgatccttaaaaaccctgtgtaagtagtctccaagctaaaaacaatctacactaatagatctgctcatcaaaagattattttgagagcattcgggtaatgtaaacaacctttctgctttgtagcacccagcagtgagtatctggagacgttggaaatggggctcacccgatgagggctgtgagcatgagcctcgagggcgctgcagggttcatctcatttctctcttcatttattgagcacctgctggataacagtggtcggctgttttatgtccgttgcacattattgcataccgtgtctaataagcctgcagaagtgggtgcattatcctcactgcaaatgtggaaactaaagcttggtactaggaacttgcatcaggttccctaggtggcagtggtgatgcagaacacacacagatctgcagaccttaaagcctcacgctcctgacaactgagccatgctgtccccagagccgaccttgtatgccatgacagggccagagagagaggactggttacttactgcacaccctgagagacaggaatgggcacagttgtcacctatgccataggaaatggagtgccacctgcacaatgcagtgagtcacggttctccctgtccctcctgcgaccccagcttctgccctgggctgctggagggcacacttaggggcacaaacacacctgacaacaggttgtgggttttgttggggtggagcaccctcagacccctcttgcctcttccttccccgggccccctccgttatccatcaggaattctactcttgggacttggaaagtgaggagagggaaggactagctctgccgatgtgacagtctcagagcaggatgtccctctagtgtcctgcatccagcacacgcacagcacgtgtactggaggcagctcttctggttctgactctgtgggtgcctttcacctgctggtcctcagcagagcatgcaaagggatgagggagggtgattcactgtgggagagttaaggatgggagcctctgggatcgagctccaggtctgctgtttggtaaagtgctttacttaatttgagtataagtgtttagagtgagcagctgctgaattccccacagttcttagattcagggtagaggaaatcagaagagtccgtatctgatttccatgatggtggagtgggtgcaggcccagagagcaagagcaagcctgcacagaggttctgtgccaatggacacactgactgtcgggggcacgctgaccatgggagggtgttggggagcacacagacccccagcgggctagagctgacggttcccactgagagggaggcagaatgtagagatggccatgtggcaggagctgaaaggcctgcctggctctgtggtttgtagagcagaagcccaatggccgagcgctgggccaggctttcgggatgctccagggctcaggttcaagatgctacatctctgcttggtgtcagaggggatgctggtgggatatgagtgggggctgcatggcgaagcctgtctctagttgcattctggctcagggaaggtgggcttgcttcctccctaaggagcagtttctgattgatgatggatagcagctatttttctttttatcttgttgccatgagtgtttattggggttaaacctgcatctttcctttacacattaatgtagggagatattggctttgagaaatgagtgtagatcagattgactgtttagtctaacgtgttcataattggtgcaagttgtctgcattttcttaaccaaaaaaatctaccccaggggaaaagtggactctggttttgctgagataccaaaacatgggtgtgaagtaactgggagaagctctaggaatcttctggtcctgctccaccactgccaggtcatgagcactgcaggaaggcccgagggtcaccaagacgccggcctgccctgcggtgggaggacaggggaggggtggtactgccctgtgcctcagctgactgcagggcctgggaacactggccaggagaacggcgcacagagccaatgcacgcactccacctctcgcctccgtggtgggagacgtccgggcacccttgtttgcttggagcacttcacttaaagtgggtctggctggtcattttcttgcacttaccagctttatggctttgtttcatagtttagtcctcagaacggccaaaggagaaagctgcagaagagctcaccaggaggtagaccatgtctgtgtcctccagggctggcaggcaggaggaggtggaggggtaatggtcctcctgtgaggagaggagctatggatggggagtctgatggcccctgtagactcaggtgacagtgagaaggagaaactcagtgtaccaatggtggcattggggctggcttgttactctccctgggtcctactccctcacgtggaggaaggggtgactgcttggcatgggttggcaaggactgtgtgaactgtgtatgcagacagaaggtaagtccaggcttggccagggccagagtcatgggcagcagcggtgatgatggcagatgatcaatcctgaaaggtaataaaaatgcccagggtacagcccagaaatgcctgtgatagtcccagaggtgcctggagcatgcctctgttcgctccctccaggccccagcctggcagtctcccgctctgggtgcttgggccatggccacagccttccccctacttaaggcctctgttcccactccccacttgtgggcctgctggacacctgctcccctgctccttccttgccaccccattgccagcctctgccaggcctcacctcactgcgttgaaattgagtgttttggtggccagtattgagctcacagagggagtggagctttgctcccctgtggaggagcactcagaaatgctggtgaccacagagacccctggtgttgtccacaaaggtctccagaagagagtaggggagggatgggccacccagggccgaggtaagatcctggtgagcaggatgggggcacacttcagccccttcctaaaagctggggctgagggagagcgctgcagggagctgtactgtactgtgattcagtgcacatggggacctggaagcaggggacagtagcccccttttgtggtcagaaaatttgagaattggggatgctaaatcgctggcctgagccacagaggtgctacgtgctggatttgggatttgaacttggctctctgcctggctccttgtgtttgttctctctgctccctgggaggatttgccagtcttgctgctgagccactggggatgctggggagtgagtattctatatgcatcagctggtgaagcgcttatcaaatgacccccagattccatctcacttggggaggccgtgtttccgcctccctcctgtccccacacctctgcccgtgggtgtttttccaggagagcttgccctgggtaggaaagccgaggggagggtggcattgggctgccttctcacttgctgtcacctcccttgtcctgccccctggccttcccagatccaccgtaatgaaagaccttgaacgaacacatccctcaggtactcagcccagggtcttacagaggggcggtcccaggggaagggggttggggcctgcagttttctcaagtgtggtgtgaccctcaggaatttctttttggtgatcttgtcattttggtgggtgttcatttccttgagcatcttcactgtattagtagccatgagtattactgaaaggcatttttattcttaaagcattcagggactgatagcaaccaaaattatcagacaagctgcaggagatgaaatcaatggaatttggcaattgtggggcaggaccttattcccaaaggtggctggtctagggcgtgtggactgggaggcaggcatgcagaaggggacacacccctcccatcactctcctctcgtccagccttggaagccactggagtcacatctgctgcaggaaaccctgtgtttgaattatgtgtggagcagtcacagggtggttttggctggatgaagggcatagagtggcatctagaagtgcatgggagaccattgccaatgtcatgggttagaccatgtttttgaggctttagtgatttttttgagacccttcccagtctaggccaggcagatcatcttctgtgcacacctctgcaggtgaagtccccgcatggctaagcacatgtgtgtggagtgtgtgtgcttaaggatgtgtggcctcgtgtcagatgacatgtgtgtggggtgtgtgtgtttaaggatgtgtggcttcatgtaggttgatgctcttgaacgtgctgactttaaaaaatccacactgggctcgtctgcttccctgatgacagagtttgggaaactaatgaaagacattctggccttgtgccatcagaagtgaagtcaatgtggggaacagctgcctctgggaggacgttgtctgtgcgctgtgccgcggggcctctgctccatggccggccacacagccctgtcctggaagaggcccaggcagctgtcaccccttagcccagtctggaaagagcccagggtctggagtaggggtgacagtgaggctttctatggaagctgctttaaagaaggaacaaattgagcctggcactggccttctggttttggagactgagttgccctgccctgtgcttgcagatccactcagtgtgaagggcaggacagcttcccctttccacacctcctcataacctcctgggaagctgctgaaatacaggtgttcatggtggggttaagccagcttgtgagtcattagcatgcctttccacggccaacgcacaaaacttttgtcttaattagacttgaggcacaaaccgctgattctccagtgcagtgtgcctgctgtgccgtgcgtttttgttagtgtgtctggacgtggtattcatatattaacagtgcatgctggggcacttggactgcagggcaatcgcttgcctggcggtgggagcccagaggctgaggtggtgcgtcatgttctggccacggtcaagccccggagtgtgtctgtgctctgtggggagcctaacctgtcatctgtgtcagtcctctctgagtgtcctatggggaaaagttcacttggggctcatgaaagcttgcttttgcatctgtccctgagcctggtccagtgtgagcaagctgatgccttgtggaacctggatccagacctggcagggtgtgagtctgtgtgttagagagcatcctccttccagtcctggccttgttggcttcactgcctctgcgtggctccaagcctgaccactcccttcctcccatgcccccagcgtgcctccttctactgcattcagatttttgtccactcacccggttttcctcttttctgccctgggttctgagggtccatggcctgcaggacagtttgcctaggataagccaggacacatcagaggctggtggaagcctgatctgctgcttagaatcaatggtgtttctgacatggagaggtggacattcaggtgcctatcattacatggcagtaggaaggtgcttggaccctgcaggcctggtgctttgtacctgtggattttccaagtcactttattcaaggatttcatttcactttcagttcttaaagtaagggcctggcaaagggataggcagcattctgtttctctgagggaggtaatgctctgccatcagcagatttccttatgatgatggaaaagtgtggtcaagggatgtgtttgaccctcctgtaagaagaatgaaggtgtgctgcccacgcagtggtcactccagggggcccttggttgcaattcaaaggcaagcaggaacctggaggcccagaggggcaaagggcatggggctcaggtcctgtggtcactcagcacatgctctctcagctgcaccacagtcccgcacaaggccatctatgcttatcacctgggtgcagaagaccaagtcactaaaaccccagagccaggggtttgctccaggtgggcctggactttcagctaaggccccttctggattggcacatggtgaggggagcttccacacccatgattctaaatcccaggagctctgaagcaggaatcttttccccctgtttggcatagctcatctgctagcaaaacctgctttgagctaccaggattcccagtacctttgggagtgttgggtttccctacagagatgtggtgcagagtggacgctgccccatacctcccgggaggagtgacatctcacagggccagtagccattctacctttcccagatccaaacttctccaactctaaattcgttgaccggtctgtccccagagaaagcagtcaatgctgtgagtctgcatctgaaaagacagtgagcatttgtggaccctgcccaggtggttccgccatcctccacagactggcagcactgaaatgggacgtgcaactgtccctgtgctcagctctgcactgctcttccctctcagcaactttctgatttgcatccatgcttgctctccatgtttctgtgatctcatctgtgacatacagatgacagccatggtattggcctcatggggggttgtccagagataaaaaagacccagtgattatatgccacagaattttgcatccaaaatttgcattttaaatttttccaagggacttttttctgctcgggtctagcgaatggccccttggtctctcctgtgtagtgttttgtggtcacaataaccctggattcctgatgccctggtggagaggcgataccagtgtctgcagaccataagaaagtacatcttgactctgaaccacagctataaataaattgacatgtttatctgtgggcttacagtgacatataaaatcttttcttgaggtgcttaggtatctctaggctacctgagatacctaagagagatacctcccttctgagagcaccaggttgggacactacgctcaggtgacttccatgcaccctgcagagccaccctcccccttgaccctgttggtgctggagactgcatcatctgcactatatacccaggcgcaggtggttggatttgtccaatgggaggcgggaggggaactgtgagatcagggtgttccccttctgggccctccctcggatcctatcagaggcctcagatctcatcagaggccctctgcacagagctcttctctgtggcctctgcagagctttttggcccttccctttcaggcctcagatattaaagcttcgcactgttgccagttttagggcgctgcactctcctgtgtgcagtttcctaaaccccactcatagtcctatagtttttcttttgctaactccccttagtgacccaattaagtgtgccacctctctacatccaggacctgcctgttcaaataagcaagccagagaaaggttcaagttcttatttgaaaggcgaagtgagccctggcatgggccatcccatggccttttggctgactgccaccagcaggttgagctgtcccattgtcacatcactagccttaatatagtctcatgccctgaagttgtcttgtttgcccacaagacaaggctatcaggaaaatgctgtgaaccttggtttccaagaagaactcaaacttagatgcgatgtgtttgcagccattcagaataggtgcaaggatccaaatccctgggcctcaagaacaaagaaagttaaaaaccgagaagactgtcattaactgtaattgcttttgcataactcctttcagagttattgcaggcatggagtccggggagttgcccatagttcttaatgtattagggaacaggaacactcagaggtattctcatctaaagaccagttcacaaaggaggcatttgaatgtggatatgccagctttaaaacccgataaagccagaaagtatgagagcccacagagatgtcattaaggaaattatttcctcccaaaatagaggcaccccaggtgacctctcaaaacagaatttttgtcatgttggtctggagtcacctccatttcctttctgttgagaattgttctgtttcctgacagcacactgggatttttgcaaggcaagtcattgtcacccaaggagactgacttcttttcactcaattacgtttttttctctttgccgggagcctgggagattgctggacctgacccctgtcttaggaacatgggtaaaagttgtcatgatggaagacacatggctgggacagcagatggctagaaagctactacaggaggactcaaatcactttcttatttagtagcttctggaaatctttatgcccatgtggtagaaaaacagatgggtgttccgtaaagaaagcggcaccagtgtctgcagagcataagagattgcatcttgactccaacccatagctatgaataaattgacaaatttatttgtgggcttatcaaggacataaaaaatcattctggctggcaaatgaaaatggcattgtgttgctcactaacattcgtttgtcaactgttcctggaataggtgctaaattataactgaggagctggcgttataaagctgaactggattttccaagctgtcatatgaaaagaaaattattaactatctcctcctccatcccctgtctctctctctctgcagaaaaagcccctttctctgctgtcatatgacttggactgcacgctctatgtgcacacggtgtaatgaatgccacattatcacccactggctggggtgagccttcttgttatttatttccaactggaacaggatttcacatcccatgctcccacacaaaggtcttagaaacaaccatttcagacagttccttgcatcagagttttagggtactcttctgcacacaaactgttgttggaacatgagcttggatttcttgatgctacatgtcacggattggcaggaaatggtctgggtggtgctgctcttatacgcactcttggtcagacattgtgtgtggtggaaatctgtgtaaggatcttagcaattatggggaccatggtgtagcactgggatatcttacttttcacttagatgtctctgcttttggttttgagacatcacgtggaaagctatgttggttttcatcctattccatggctctctggtgttggcaggctgcacttcatagcatagaagatgaaacatgatatgacttcaggaacgcatgctgagggaagatgtgttgtcatgaaaatacacttttttttttaagctggaaactgggtgacagtgaaatcttaaaaactggggaaatcgggaaatcaactaactttctcagatcttggtttcctcatattgtgtatcgcattgcgggtttgaaccagaggattgctgaggttccttccagctctgcttctagttcttaaatccaaagcctatggggctcttggagtagctcaaggcttctgatctttaagttgcaaacagaccactggggggaccttgttaaaatgcagattccgattctataggtacagggggatgcctggaattcaggattaaccaaggaatctctcttgtgatgccaatgctgctggtccgtggaccacactttgattaccacagatatagatgaccaaagttgcatggtcctggatgagccagatcccttctttgtccgggtggcttaggtctgggtggctctttcatatcttcagacacatcacatcattccttctctttgtcagtaaagacagacaaggaaaatgaagtgagaacttctctttctagtaatataacacattgcccccaggcacgtaatacatacttattagagtaaatgagtgataagagaaattagtgtgatcagggatgaatgtaccataaatactcaaagtcccttcaacctgccacacacgaacacacacatatatgcatgcaccagatttcattacccggaatcctcatgttcgtattctatagcgcccaacttctattttcctcactgtctcctacacatattatgcctagctaggctatgtcctctgactatcctttggcccgcccaatgcctatcattttctagatcaatgcaagtcctaagtcttcttgaagcctctggattcctccaactcagacgccctccctccctgttgtatccatggtctttgggagcaaggatgcagacccagacctgactgctgcacctgcccagctgcactcaagggaggtgctgctgttacacccatacctttcctgggctcaggactgggcttcagagcctttacaacacagcactcttgatggcttctaacaactgcctgaaacatcttttccatccctgatttaaggcttaaatattatttttattcttcatgtatatattctcttcctgttttgccagatggtaaattcgttgagaatagctgctttttactgttttcctggggtgcccggcaatatgccgggtacatagtaggtgcacattaaatgatgagctgactgcctggagcagcactgagtcatacattctcatgtgctggggtaatgcttaacacaacaaataatcccatagcttccttgaccccaaaggtgtccagaaccagtcacttaacagctgaaatggaccctgatttggggcacttgtctcatgaacgtggggagagtgagagggcaccatctcacatgattcctttgaaaatgctgtcaggatattatggagaaatgccagaaagcaacaacagaaggctgttgggagaaaaagaaacagagtaatctctttttttttttttttttgcattatgcttgaaggaggttgtttgctcttcagtgttctacatgcagctgcctctattgcttttggttggaccaggcccatctgcccaaacagtgagtggggattatgcatctcagttcctgcaatctcgcctggctgccgtgcaggagtcagatggtagggccaggaggaccgggctcagggccaggggccttcgggcacgtgctgcggaggagcgcttgtgagatgcacatgccatgtctgcagccggcgatgcccttggaagaagctcctgccactgtccctgtgatctgctgagcccaggcagctcctcgtggtggggaaatgtgtggaggaattttggaagactggatattgttccagtggggtgtgagatcctctggccttaagtcgctcctctttgctcctctttgtctcccaagccaggcttatccgcaggtttcaaagtggggaacctgaacttggtaaggtctccagtttcaggtgactgttgtgtctcagctctgtcaaggagcagctccaaactgagccatatttcatgccttctcagtctaaagataatatacttttttgtttgtttgtttgagatggagtctcgctctgttgccaggctggagtgcagtggcacaatctcggctcaccacaagccctgcctctcaagttcacgccattcttatgcctcagcctctcgagtagctgggactacaggcgcacgccaccacgcccagctaattttttgtatttttagtagagatgaggtttcaccgtgttagccaggatggtctcgatctcctgacctcgtgatctgcccgcctcagcctcccaaagtgctgggattacaggcgtgagctaccgtgcctggccccaatatgtatttttaaatgtttctttctaattaaaagcatcatttatgttctctacagaaaatttgtaatgtataaatgtataaacataatatttttaaataggaaataaaagttgcccttttcagaatccagagagtccccttgttagtgtattggggttccacatatgtgtttgtttttcaaacatggctgggatcatataaacatgaagttttgtatcctggtcttttcacttaatgctatgtttaattggaatattttcactacactaaaatgttctcaaaataggatatttcatagctgtggaagaaatcattgcgcatatttcccatgatttctgtaactgttcacctatccgacgtttagcttgttccagtttttctctactttaaatgacatcatcccctagtttcacattgcattccctgatttctattttgggcatttttctttcctcttgccaattttctatctatagactctgcctagaaaagcgtctttttgggatggtgctgagaggagcacaaaccggcctggtccatgtaacagcaatttgacatgtatttattcattttttatttttttgagatggagtttcactcttgttgcccaggctggagtgcagtggcatgatcttggctcactgcaacctctgcctcccaggttaaagcgattctcttgcctcagcctccccagtagttgggattacaggtgtgcaccagcatgcctggctaattttgtatttttagtagagacagggtttcaccatgttggtcaggctggtctcgaactcctgacttcaggtgatccacccatctcagcctcccaaagttctgggattacaggcgtgaggcaccgcaccccaatttgacatttaaatggcatctgtcagctgcagttcagggagggtccctgcacaagcaggaaggactgtctcgccatgacactgcaggggacacactagaaggaatgggacacagggacagagctccgcaggcagtgccctgggcctccgatggtgctgtgtggggccctgcagacagactcaactgccttagggcacccgtaggagggaggacagagggatggtggagggaaagccttctgctaaaaatacccagcactgcactgcgaaggagtttggatgacaacttgtaggacacagaagtgtccatttgtgtgtcatcaggggccagaaaaatctgggaaaggggctgcagccctgttctcttgtctggactgatctggacattgagtccctgatgtcccaggctaccccagtggtgaccgggctgcctgccctaccctgcccccttctctctccactgccagtggtgggtcagcccccatgtcaggcagtcatcctctgtcccctgcatgcactgaccactagaaaacaaagggtgtgaagcccatgccaacctgggaagcctcttcctgaaagtaagtcaagtttccaagactccttcatttgtctttgggcagggccctctcaaagtggggatgagttacatcggaaagtgagtgtcctgtcctagcaatgttcatgttggctgtcagccttccctgaatcacctgctcaaagccatgtgaacagggtgcaccctctcccagctgtaggtgaacgctggggttttgttacagatcaggagtcgggaatgctgggagccgcagcccaggtgtcttgctcctctacctcacatttccctcctgtgaaacagcctgaggcttgttgccgagtagccctgactctttaccaatggccggcgccctcctctatgttctccaagagcttccctgggtgggggtctagcatccagggggcagtgcttggccgagcagctggttgtgtcacatcccttcttggaatggtcttttctctgcctggaaagtgacctggattcttccttctgacatgtaagatggagctctgttgtggtttatgattgctccttgggcccctccatgtaatcagtttactctgcccgaaagtctttcttccactgtttcaaaggaggaatttgtatgtcacatacagctccttggtgggggattttgctggagacatggggagctgctctgaagacagtgtcctgcctgtataaagaattgctgtgccgtgtgcggtggtcatgcctgtaatcccagcactttgtgcagccaaggctggtggatcgcttgagtccaggagctcgagaccagcttggtcaacatggtgaaacctcatctctactaaaaatacaaaaattagccgggcatggtggtgggtgcctatagtcccagctactcaggaggctgaggcacaagaatcacctgaacccaggaggtggaggttgcagtgagccaagatcacaccactacactccagcttgtgtgatagagggagactcagtctcaaaaaaaaaaaattaattaaaaaaaaggtaaaaaaaaaaaaaagaattgctgtgagagccatccttgcattcttccatctgatcatcataggcttgagcaccctgctgggtgatgtggtgacggggctgggctcagctgggaggaagacagacacagccctacaggggaagctagggccacacccaagaaaggggcagtcacgacccgagtgggaggatggctccaagtgaggaggtaccgactcagcccaggcttagccaagcctctgccccagagctgggcatcttggggtgcacagaggaggtgctgcatgagtgagaaagacttagtgaggagagaagcagggagggaaggaagtgggtggcagtggaaacagcactttcccagttgttctttcagccgatgttcattcagggctcatggtagccaggccttttccaagctattccatggattagccatcgctatgaattctcaggatccctgcaggaaatgccactgttgtccatgtcacagatgagaaaattgagatgcagacttagagtatctcatccagtggcatgcaagtggtgtggtacggagcacccacgcctggcctgcaggtgcctgcccctctccacccctgtccagtgatgagcgagctcatggcaggcatgcaggcaccctgggctcctttgcacacactccctcgcttgggcctgcggtggctccaggaagcaggtgctcttgtcatccccaatttgtagatgaggaaaccacaggtcagagaggttaaacaattgctcaagtcacacagctggtgagcaccagccaggctgtaacccaggccgcctggctctgaagtcttcagtgtctaaagaactcagggcgggagccgaggggcacgcagggcagggagaggaccctgggaggtgaggctgggaaaggaagcagggctggaccctaacagctttgtccttcttgtgaagaagggggcttcatgttgagagaaggaggtctcactgtggagggccaggtggtgatcccagccacatgcttgtagccacctgcaagtgcccaggcatgctgcagactcactgcagccccacaggacaggggcctgctgcctggttggtgtcaggaggccggcatttggggacatgaagatcagggagggggaggtttacctggggaggttcacctgaatctcccatggttgtgagatcttgtgggcacgtctgtggtggactctggccggctttacggatggctgcaattggcactccctgcacgggcatctctgtgtagcttgaagctggactctctctcaggtgtaagtgggagctccttagaggtggggcttgaggacagaacccagcctcctgcctgtgccgacactgctccctctgtgactgtgagagacattgcagcccttcactatagcttggttggagactgacatctgtgaaggattgatgggaggctctgaaggtgctgtaatgaagtttcctccccaggatcccttccctgccccagccaggttggccccccagaaggctgctgggtccattcactgttctctacgtctgtgcgcagcccccaaccccgcccatgtcagcattatcccctaggacccagagcctcctcccatctcctggcttccactctaaacagaatgacctagtattattattattattattcgagatggagtttcactcttattgcccaggctggagtgcaatggtgctatctcggctcactgcaacccctgcctcccaggttcaagtgattctcctgcctcagcctcccgagtagctgggattacaggtgtgcaccaccacacccagttttttttttgtgtgtgtgttttttattgttagtagggatggggttttaccatgttgttcaagctggtctcaaactcctgatctcaagtgatccacccgcttcagcctcccaaaatgctgagattacaggtgtgagcctctgtgcccagccttcagaatgaccttttaaaggtcatcagggcatgattcctgcccctccttaacatccacctgtggcttctcagggactcagggtaaatgagctgggccctgcaccatctgttcttgctccctttgctcctgtgggtggaggcaggtgtcatgggcagcagagattctgcagagtcccctgtgaggtgaggggagtgcagaggattcgcgtggcctgggacttgccatggcgtgtgggaataggcagtggtcagctggggacactgaccacactagcagagctgctgccagtggcccccaaggcgtctcacctcctgacagcactgctatagcattgccagatgttattttgagttttaaacacaggagtgtggattgggctgcagtgtggattaactaggcctggggacctaccctgaggagctagtgatttacctatttcctcctccattcctgtagcattctcttactgagcacctgctgtatgcctggccctgggtatttggtggggccaactagactgcagctgttggtccaggtggggggtgaccgggatgggaagcccaatacggctccacagagagtaagaaagctgtgggggcagtgagctagggaggacagcagagagagcagggcctctgcaggggggtgagttccccaagaagaccctgcgattcattcagctgtttttcattgacaccatcatcatcatcgtcatcactgttaatacaaatgctgtacgtaacagagaagactgacttctgcttccatcttcgatgagaccctttgctcagttgagagaaaacccaccaaagaggggaagggaaggaggagagattctgccccccaggggagcagcccacatagccgcctgcaagaggcctgtgtacccaccctgggcatacctcctccagagccagaggggtgcctggtgtgggtcagtgctccccaccagaccagtgcctccgacccaagtcagtgcctcccacccaggccagtgccccccacccaagtcaatgcctcccacctaggccagtgtccccaacccagtcagtgcccccaacctgggtcagtaccctctacccaggccagccccatcccaccaggccagtgtcccccaccctggtcagtgccttccactgggccaatgccccccattctgcccatgccccccaactgggtccgtgcctcccaccaggacagtgtcccttatccagtcagtgcctcccactcagtcattgcccccaactaggtcagctctccccactaggtcagtgctcctcaccaggacagtgcccccgacctgggccagttcgccccacccaggccaataccctccacatgggtcagtgcccacaaccatgtcaatgctccccacccagatgtgtgttccccccccaccaccagactagtgcccctcaaccaggccagtgccccaggcagccttgggtttgcgcctcagctggtgacagctgaggctggtgtgtggtgcagtgtgggaacgtaccctgtgggatgttctgcactggaggtggggatctgtcccactcaaacctgcttctcagggggatgcagaggtgaatagggcattgtggcagtagccaagggcgggtggatggcccagctggtagaagtagctggggatagagaagtcaccaaatagatgcagagaagggaaggagaggcatggagagcaggcaggagcatgatctcagctatgtccccgaggagcagagagaactccgtggctggctagacaggcgggaagggaagcgcatctatgtctgtcatccttgtccctgcagttctggagcctggttcagtttctgctggggtagaagcacctcagagcagagtgatggctgccctagttcccatggtctgtgggtcattgaaggagggtccctcacggctcagggaaaaaccatttctgagcccaggctgggtgggggatgatttaggtcactttgctccaggtggtgagccccaccctgaccttgactttggccaactgttgtctgccagccctgcaggaggatgagccccggggtcctcagggagtgccagctgaaaggggtgtcagtcaaatgctcctcggagcacacccgttccgtgctccctctggccaggccttccctggctcctgtgggtccaggtccgtttccccacactgacataccccatcagctcaccctgtgaaatatccctgatctaaccttcttccacccctggtctggtccctctgtgtctctccccaggatgacagagctgccaccagagggtcctgtttctgcccttgccctagcatctattctcaaacagtgaccagagtgatcctgttgaaagggaaggcagatcatgccagtcctcaactcagaattccccagtgcctcccatcactgtcagagaaaaagccaggccgtatgacacggcccacgccggcctgcaccaacccccacccactgcctccctggtgatgtctccccccagtgccctctgggtcacctgcttcagccacaccagccctgtcttccccacaagccactgggcaggctcccccagggcatttgcagatgaggccccctcagctcctctccccatgggtgttgcctccatgccacctgctcacggggcctcctctgaccactccagttaaaactgcgaccctgcctccccaaggactgcctgctgctttctccaaaggacctctcactctttagctttcttgggattttatttatagattttattttgttatttcagatgaaaatttgaagcttgcaggggcagggatattttcccatttgggttactgctgtgaccacatattccagaaagtgtttggcacatcagggtccttgacacatccttgagtggccatccttaagatcaccctaagggtgatcttaagtctgccagccaccagggccttttgaagcagggagacctcccatgatgtacccctaggccttagccttgcaccccaggacaggaggactgcgctcccaggggagtcaccaagcatcatcatggggtgacatttccttccatttcctaaagtttccttgcatgagctcacaggaaaccttgaattgtaaggcccttcctttgccctgtacttgccgaacctaaaagccagttctgcccggaatgttctaaataatcagggggataaagaaagagaatcctcaagcaaggcttttctttcactctctgctcagttggcagcaccagatggaggatgtggccgtggtgtgggctcgtttatttattgattaaaatgcttacaaaacccagcatgtacagccaggctgaacattcaattaaaaagcccaaaatgaaaattcagaactcctgaatgacaagtaggatgtgcagagccagctcttagcaaaggaataggatgataaagctttaagcagggatttgttctatttatttatttcgctctttcttcaagaatttggaaactggaaggcactgcacagtgcccagtcactgcatgggtgagtgaatgaacaaagcttacacagtgttgggtgagcagcaaggataagagaggtggacatttgatgacagctaggtgcatgtgtccctgcacacacagggatgggaagaataatggccctgagatatgctctcgagagggcatcctgaaatttttttttcttttctttgagatagagtctcactctgtcgcccaggctggagtgcagtgaacctccacctccagggttcaagcagttctcctgtcttagcttcccgagtagctgggactatagtcgcacgccaccatgtctggctaatttttgtatttttagtagagatggggtttcaccacgttggtcaggctggtctccaactcctcacctcaagtgatccacccacctcagtgtcccaaagtgctgggattataggtgtgagccactgcgcccatccgcaccctgagtttttataccaggtaagcccttgagtgaggaaaagacatgaatccatgctccagagatgacaggcatccttttccataggggatggttaggggtatgattggcaaatatgcactgggacttcaggttcttcctggtggtaagaaaccactcgtcctccatccatcttcctcttccttctccatccaaccaccttcctcttcctccttcaccaccttccaacatcagactgagcacactcttcagagcccaccagctggagcagacttcatgtgggttgggctccacctcctttctcagaagtgagtgtcatcacctagagtgtcattaccacagtctttgccttccaaggctcctactaaatcagaacgacttaaaaagcaagcagagtgccctctctgctgctttggaggcagctgggccatggttagaaggtgagggccacagcatggctgctggctaccagctgcagatgctggtgccgactagccttgcctgagtctggcttcctcatctgcagaggggcagggtgtctcacttgaaagttgggagacttcaatacagttgtgtatgaagtgcccagtacagtaaattctcaataaataatcattgctattttaatactgtgggaatagaaggccagctcactagctgcaagccttagattagtccaaagacagcagagtcaagagggggattgccctggttcctctgcgcaggctgatgtcaggggtttgctgatctctgtgcaccgggactcagactttctcccgtgtggccacacttgctgtgtgtggtgtgtgtctgtgtgtgtatgtggtggggggcgggctgtgtatctgtgtgacgtgtgtgtgtgtgtgtgtttgtgtatgttttgtgtgtggtggggggaccttgggtctctgtctgtgtatgaactcatgtagtctcccctgcattcctctcctccggggattgctggccccttcgctgtttgatggcaggtgtctgaggatggagagggcagtgccgcagagtgacagcacagggcatgccaggacaccagggtgcccagagcccataaaccacagcctctgacagcctagtgtctacgctaccaccgtccccagggcctctgtgggctcagagcattctccccacctcaggccatgccgagaccactaggctcctttgcatagaaatttgagctgtattttgttgttttgaggagaaaagtggtttctcaaaggcctttgattcccatgtatttgctaagctggccttgcactttcctacccatcctttttgggtgggttgcccacaggtaccatccttcttgtcttcattctggccctgtcttgcctctttagcatgtttgagaattttggacaaatggagagaagtctgttctcaagggtgttggcctaagtagcttccccggtgcgggaccggggtccattttctgccctccttcccgcagcctctcctgcatgtcttcctggacctgtgctgatttcagcatcttcgttgtgtgactcagttcttctcaggaagccatagaggtttttctttctagagctttgagcatttgaagaattctgcccactgtgtcttctctcctcccactgcaatcgatagcagagaatggagaggctggtcattttttcagactgctctgttgaacacggatctgcaaagctggcgttggtactcctacagccagtgctgggacacatgcaatttgtggtgtgtgatgctttcaggttgctctaagtgtcagtttgacatacctgaatcctggggcatttttttgtgactgtaatcatccataacagcatatctgtgatggatcagtcaggatgggaaagttaggctgcaggaacagcaaggtgaaatgcttgctgcttctgttcatgctgaccatacccaaacacagaactggtgcaatcctgccatgccatggaggcagagagccaggaataaccaggcacaacatgtgcctcctcttagggcccccataggggagggctctgcctgcaccgaagatgctccacagccctctaggagcttggggaccaggccagagaccctgtgctgtgctgctgacagtgctaaattttgacagtgctaaatttcactgctgcgtaggggattagccagcccaggccgccaggtctggctcgggatggcgtgacctctggagttttccacagtcctgccattggaagtgatcccgggagacaaggcatcatggtgctcctatgttcttcctgttttcagacacgacatttcacctgcctctcggaggctgaaataagttaaataaggttatgctggagaaaagtggacattctagtgatctctacatctgaacatgagatcagattatctgatctccttagctttttttgtttgtttgttttttgaggcagagtcttgctctgtcctccaggctggagtgcagtggcatgatcttagctcactgcaacctctgcctcccaggttcaagcgattctcctgcctcagcctccctagtagctgggattacaggcatgcaccaccatgccctactaattttgtatttttggtagaggcggggtttcatcatgctggccaggctggtctccaactcctgacctcaggtgatccgtccgcctcagcctcacaaggtgctaggactgcaggcgtgagccaccgcgcccggccgatctccttagtttttaaactccactgtagccaaagaactttgggagagattcacttggccccaacaggatctgaggaccacctccctcacatatgcttcccagtgaatttggaacgtccatccatgtgaggaaagagcttgcctctggcagggttaagacaaggtgtgcgttcagttgaatgaaggtgggcactccccactttgggggccagacttttctccttcgctcacactatatttttaatgtaggatgatctttgtgtagactggtacatggcagaacactaagaagatgaaactttttaagtgaaaatattttcaggcctaggtagccagtaaggtgaccctgcaatggtctgtttccttctgagcctccaggaaggaaacccacccgatgatgcccaagggacgggagagggccgccacacgggctggcgagacaaagtcagggaggcaacagagccagctggcaagtgcaggagactgcccacattcgggttttgttttgcttggtattttagttttttaaaaaccactttgttgaggcctggttggcatataaaaagctgggcatattttacatacttaatttctacatctcgatgagtctgggggtgagtctgtgaagccatcaccaccatcaagaccgtgaacaagttcatcacctctcagagttgtgcatcgcctcctgcctcctttgttattaacattgttattatttttggtaagaatccttactataagatataaccccgtctctactgaaaatacaaaattagccaggcatggtggcacttgcctataatctcagctacttcagaggctgaggcaggagaattgcttgaacctggaaagcagaggttgcagtgagctgagatcgcgccattgcactccagcctgggcaacaggagcaaaactccatctcaaaaaaaaaaaagaaagatctactctgctagcagttttaagtagacagtacagtattgttagctggagtcacactgctgtacagtagatctccagaacttactcatcttgcagaactaaactatagtcttggaccaacacctccccattccaaccccagcccctggtaaccaccattctactccctgcttctaggagattgactttttagctccaacatataagtgagatcatgtggtatttgttttcctgtgactggcttatttcgtttaacataatgtcctccaagttcatccatgttgtcacaaatgacaagacttccttcttttttaaggctgagttgccccacgttgtctgctaggggttccttgttccctgtctctggacctgcttcctgagtctcctctctccaaccccagggtgtcagtgatgttggctctgactgggtaagagtggttaactccgctgcacccgtcggcactgccctcaccctctatctttaagttcagactatttagagctatttgagtttgtatttaaatgaattaaaattagataaaattaaacatttgatttctccgtctcactagccactattcagtgcttggtgctagtgaccacagcatataggagctaatctagggagaggtgcagcctgtggaggaaaggagcagggacccggctcagccctgcccgggacagctgtgaattgctagattagacctcgtgagagccacttcagggggaaatgggagctcagagagccaccttagaagacatggggtgacgctgctgaggtcaagtgccagagtgaaaactgctcggttgggtttctgtcctgtctgtaaaatcagcgtcaacttatgagtaggaatgtttaatgtgtgttgagtgcctcatttgtctggatatctggtttcactggtacttccccagcctgggtttgttgcggttccccgtctgaatgttatttgggtccatgctgtaagactgccttctaagagacttctgattattctgataatattaatctcttagaaaggggtccacagtgggggttatgttgatcttctgggttagttgccagggttgtgatgttctaatatatctctttctcagctggttttaacctgctgacggtttccccctgggaagttcagtgattcattccagactggaggcgttttgactgaggcctgtcatgaagttccctgagaggatgaagcgcctcttctgtggttacctttaatggcaggtatggccatggaggcccatacaggtgtctcggggcaatcaaaggccccttcttaggggaacatcgtgcttcctatttccctgtctccagcccagttctggcccctggaggctcaaggagcacctgctagtttccttctggtctctccaccttacttcccactctgggcgcagaagtgctgtgtggaaattatgcaccaggaagctccgtacaagcagtagagagtctcagctaagctaagggagatgagaatacaaaggtctggcaggtcctcttgactgtgggcctcatgtgcactcagcattcgctcagttccactgcatgcctgtcactgtacactccttcatgtgcggtgtgtggctacaatgcgggaggacgcacattccaggcagtgttctctgcggttccctgagacagatgccacaaaacttgctggaggtggtctcagaggctggggctgctcggcatctctcactgagaaagagcaggtgacagagaagaaagcaatccacgcagagccctttcccacaccaggagttcccctgagctctgccctttgggctgctcctccagctgctcctccagctgccccttccttgctcattcagcacggtatttagtgagcacagtagatctgggcattacagagctacaggtgacttcaggagtgattcgctgccttctgctgggctcttactggcagcgacagtgggatgtgcttgggatattgcttttgtctacctcacgctaaagttgtttcattcaacatcagcaggaagcagataacattgtcaacacgtcgcttatagagaaaatccactaaaatggtcagagcagaccgtctttcagaagagatgcagtctgccagatgcagaccccaggaagtgtcagcagtggggccgggatgaggggtggatagaggggtgccacgtgtgtgtttgcattccaccctgcgatgttgttctgacccctgtgtgtccctgcctccaacccctgcgcatactccagcagcacctgcagagtgcttggagattcctcctggaggcttcccggggcttccgattccatcctgctgctgcccttgcaggcaggctgcacataccgcagaaggtatgggagcagagcaggtgccatggaggggcagggcagggcctctttgtacatctccgacctgcccttgtggatgctttttctctgaccgtacagtggctggtggtgttctccaggcaggaagctacatgccatggccgcaacccactgttatgcaagtatcggaatgatttcatgctgttagcagtcggtggaccccaaatgcccagtaacctagcatgttactgaagacaactccaacctggatggcagaatcacatttcctgttgcttggtgattccactaggggatggtgcaggaagaaactaaaaaactacagggacctttgatagactggttgattacgtatttcctaggttgctctggtcgacgtgtatgttgagtaagctgcaggagagccaaagcttggttcaacgggtgtgcggtgtacggtagggccgcggcatgcatgcccgtgtggatggctgatggtgtgctatggaggtgtttttgctcaattgcttgccgcttggcatgaacaacacaggtaacataattgagggcacacattattatggcagtgcagttttaatttataaatgtgaggcttttgtgtctttattgattctttgtgtaatcaacagacattctttatttctctcttacagtggcttgaaattaaaaaaataaaaagtacctgttgtactcttcatgagggaacattcacatttagtttccactgctgggaggtgcacatttgaaaattgaatattcataattacctttttgcacattggacttgtgtgtagccacattgatttaattcgcaaatttgcattgtaatatatgatattgaagatgttctgctaggatgctcacaggagcacttggccagaagttaggaggggaacaatttgtgggcaagcagaacgctgcatccatgctctgggcggaagcttggagcagataagatgcactttttttttttattattatactttaagttttagggtacatgtgcacattgtgcaggttagttacatatgtatacatgtgccatgctggtgtgctgcacccactaactcgtcatctagcattaggtatatctcccaatgctatccctcccccctccccccaccccaccacagtccccagagtgtgatattccccttcctgtgtccatgtgatctcattgttcaattcccacctatgagtgagaatatgtggtgtttggttttttgctcttgcgatagtttactgagaatgatgatttccaatttcatccatgtccctacaaaggacacgaactcatcattttttatggctgcatagtactccatggtgtatatgtgccacattttcttaatccagtctatcattgttggacatttgggttggttccaagtctttgctattgtgaataatgccgcagtaaacatacgtgtgcatgtgtctttatagcagcatgatttatagtcctttgggtatatacccagtaatgggatggctgggtcaaatggtatttctagttctagatccctgaggaatcgccacactgacttccacaatggttgaactagtttacagtcccaccaacagtgtaaagtgttcctatttctccacatcctctccagcacctgttgtttcctgactttttaatgattgccattctaactggtgtgagatggtatctcattgtggttttgatttgcatttccctgatggccagtgatgatgagcattttttcatgtgttttttggctgcataaatgtcttcttttgagaagtgtctgttcacatcgtttgcccactttttgatggggttgtttgtttttttcttgtaaatttgtttgagttcattgtagattctggatattagccctttgtcagatgagtaggttgcgaaaattttctcccattttgtaggttgcctgttcactctgatggtagtttcttttgctgtgcagaagctctttagtttaattagatcccatttgtcaattttggcttttgttgccattgcttttggtgttttggacatgaagtccttgcccacgcctatgtcctgaatggtaatgcctaggttttcttctagggtttttatggttttaggtctaacatttaaatctttaatccatcttgaattgatttttgtataaggtgtaaggaagggatccagtttcagctttctacatatggctagccaattttcccagcaccatttattaaatagggaatcctttccccattgcttgtttttctcaggtttgtcaaagatcagatagttgtaggtatgcggcgttatttctgagggctctgttctgttccattgatctatatctctgttttggtaccagtaccatgctgttttggttactgtagccttgtagtatagtttgaagtcaggtagtgtgatgcctccagctttgttcttttggcttaggattgacttggtgatgcgggcccttttttggttccatgtgaactttaaagtagttttttccaattctgtgaagaaagtcattggtagcttgatggggatggcattgaatctgtaaattaccttgggcagtatggccattttcacgatattgattcttcctacccatgagcatggaatgttcttccatttgtttgtatcctcttttatttccttgagcagtggtttgtagttctccttgaagaggtccttcacatcccttgtaagttggattcctaggtattttattctctttgaagcaactgtgaatgggagttcactcatgatttggctctctgtttgtctgttgttggtgtataagaatgcttgtgatttttgtacattgattttgtatcctgagactttgctgaagttgcttatcagcttaaggagattttgggctgagacaaaagagctcctgaaggaagcgctaaacatggaaaggaacaaccggtaccagctgctgcaaaatcatgccaaaatgtgaagaccattgagactagcaagaaactgcatcaactaacgagcaaaatcactagctaacatcataatgacaggatcaaattcacacataacaatattaactttaaatgtaaatggactaaatgctccaattaaaagacacagactggcaaattggataaagagtcaagacccatcagtgtgctgtattcaggaaacccatctcacgtgcagagacacacataggctgaaaataaaaggatggaggaagatctaccaagcaaatggaaaacaaaaaaaggcagggagtctctgataaaacagactttaaaccaacaaagatcaaaagagacaaagaaggccattatataatggtaaagggatcaattcaacaagaagagctaactatcctaaatagatatgcacccaatacaggagcacccagattcataaagcaagtcctgagtgacctacaaagagacttagactcccacacattaataatgggagactttaacaccccactgtcaacattagacagatcaacgagacagaaagtcaacaaggatacccaagaattgaactcagctctgcaccaggtggacctaatagacatctacagaactctccaccccaaatcaacagaatatacatttttttcagcaccacaccacacctattccaaaattgaccacatggttggaagtaaagctctcctcagcaaatgtaaaagaacagaaattataacaaactatctctcagaccacagtgcaatcaaactagaactcaggattaagaatctcactcaaagccgctcaactacatggaaactgaacaacctgctcctgaatgactactgggtacataacgaaatgaaggcagaaataaagatgttctttgaaaccaacgagaacaaagacacaacataccagaatctctgggacacattcaaagcagtgtgtagagggaaatttatagcactaaatgcccacaagagaaagcaggaaagatccaaaattgacaccctaacatcacaattaaaagaactagaaaagcaagagcaaacacattcaaaagctagcagaaggcaagaaataactaaaatcagagcagaactgaaggaaatagagacacaaaaaacccttcaaaaaatcagtgaatccaggagctggttttttgaaaggatcaacaagattgatagaccactagcaagactaataaagaaaaaaagagagaagaatcaaatagacacaataaaaaatgataaaggggatatcaccaccgatcccacagaaatacaaactaccatcagagaatactacaaacacctctacgcaaataaactagaaaatctagaagaaatggataaattcctcaacacatacactctcccaagactaaaccaggaagatgttgaatctctgaatagaccaataacaggagctgaaattgtggcaataatcaatagtttaccaaccaaaaagagtccaggaccagatggattcacagctgaattctaccagaggtacaaggaggaactggtaccattccttctgaaactattccaatcaatagaaaaagagggaatcctccctaactcattttatgaggccagcatcattctgataccaaagccgggcagagacacaaccaaaaaagagaattttagaccaatatccttgatgaacattgatgcaaaaatcctcaataaaatactggcaaaccgaatccagcagcacatcaaaaagcttatccaccatgatcaagtgggcttcatccctgggatgcaaggctggttcaatatacgcaaatcaataaatgtaatccagcatataaacagagccaaagacaaaaaccacatgattatctcaatagatgcagaaaaagcctttgacaaaattcaacaacccttcatgctaaaaactctcaataaattaggtattgatgggacgtatttcaaaataataagagctatctatgacaaacccacagccaatatcatactgaatgggcaaaaactggaagcattccctttgaaaactggcacaagacagggatgccctctctcaccactcctattcaacatagtgttggaagttctggccagggcaattagtcaggagaaggaaataaagggtattcaatgaggaaaagaggaagtcaaattgtccctgtttgcagacgacatgattgtatatcaagatgcacttttattctagcttcctaaaagcaatggcccttgatggcaagactgaaggactgctgagcacttgagaggagacccagtctgtggacatgcctttctgactgatgtaccctggtggtggttttgtttttccttgtctgacttcactctgaaaagggcgctaatttcaagcgatgagcaagtcatatcaaggctacccatatggcagagacagcaaactttactaaaatggtggtttgtccctttctttattgttatttttttaattaaagtttgaagttgttttctcgttttcttacatccacattttcttccatgccctgccagtggatgagatggagtcacagattttggagctgatgtcttccatgagtcgtggctgtgtggtggtgaggtcggctgctgctggtgctgtccagttttgaactgacttgagcgttgtggccggtgtagcagtcagccatagactaggggaaccttggtgtatgtgtttttatggtttcctttagcattgttagttcaaaagtatgtcacctattcagaactggttatttggttatttcagaactccaaatcttacaaagtctaatgaaaatcttacacaatcttacacagtttagtaaacaaaacacacaaggccagagggacaaatgtacctcagagctggggctctgagtcctgcccacttttcttgtgaatgagcttcccactcgaggttggcttgctcctctttctaataattctaacaagtttaacgggttttttattgtggtataatacttataacatgaaagtcattataaagtgtgccagtggaatttatgttttattatattaatgatgtttcgaccgtcagcactgtctagttccagaagtttccttttgggaagttttcatctccccaaaaggaaactctctacccatcagcagccaccccgctgggccccttcttcctggccccaggccaccacaacctgctttctttctctgtgaatttgcccactctggagatttgatataagtggaatcatccgatacatggccctttggtctagcttcttttacttcgtattttcgaagttcatccaggatcatagagtatatcagaattccattcccctctatagctgaagaatgtcccactgtatggtatttccacattttgtttatccattcatctgctgacggacattgggctgtttccaccttttggctcttgtgggtagagctgcacttaacatttgggtacaaacatttgcttgaacacctgtcttagattttgggtgtatacctaggaatggacttgctgggtcacgtggtcatcctaggtgtacgttattgaagagccgccctatgttttccacagcagcccttggatttcacttttatctacagtaatgcggaagaagggggctgatttgtgacaggtgggcaaatctgcagtgttaagaagaggcaggagacagggaacccatgcaatccacatacttcagaggcaggtggtgctcctggctcacactgtaggtaatatttgccctgtgcctgtcagcttcatctgtgtgcatgggctgagctgggaagaaccaggggacctggaaaggggttagggagcttgtctatgccagcatccttgacaccggcatgatatcaggatccctattcctcttcacaaggcccaggccttaccccaaacctgctgtacatccatcccaaggggggaggctggcatctgtgtttcttgctgcatttatttaaatgcagttcagcctaatgcacagcccgggatgagactgcaggtgaagtgtcatattttaagatgtgctcatgagaggcatggatacaaggccaggcctccctggctgacatttgggtgcttgccatgggccaggccctgccctccttgctgggtgagcgctgtaccagttggtcatcgcaatggtcttaagcatcactgaggaagacattgaggcccagatagggactgtccttggccaaggcctcctagccttgagtaggggccccggccagcagtggggctcactgcctctcaggctcaacatcccagggggatgggaagaaaacattctgggagatgagtggagagagactgattctctgtaggtgatggcatgtgccttgagctgaaaggtgcttccggtttctttgtagcgatggggtcagctgctccaggcagctgtggcagcatgagtgaaacagaggggcttattccagtgcatgtgggggagaggagggaggtgggctcagccagagcagagggatttgaagagtggcagtggaggagatatttgaaaggtgtgttgggacccgtatgcagggtgccgtgtttggactttgttttgtagggcacaagacagttgaaggctttggaactgggaggaaagtgacaagaaggagtaccaggctgtgggacactggacactgagaaaaggaagaggctatgggggaagagaggggccgtgagacccggggcaagtgtggacttgggggacacagtagcggaaagcagcaggcctgggcagtcacctaactgcaggtgccaaggtcgtggtctgtgtcccgggagaccagcgggtgggtgtccagagatgggggcaccagaaccatgtgggtcatgtatatttaatgctgcctgcttgagaaagcaggggcttggcatatgttttaggagaaagttttatttcttgaaatggttaaactgataaatcctcagttatcccaaaggctcagggttccagaaaatggctccgttgaagggtgaatcccatagatcttataagagtgattgtaaccctgccttggtatagccagggagcagagatagagggtaggaaccagattgccctggggaaagcaggtcagcctgaaacggcatgacctttgatgtcacctccgtgcaggaatgaatttctctaccatatgaatagcaccatcaactaatacatttttattattcctgccacttcataaatagtgtctccatcttaatttgcatgtgtctgtcactctccatggtctttaaaggtttgtataaacttgtaaattaatcctcctttacatgcataaggcaaaccagctccttgatgaaacctttgatgaatctttttacaagtgcataatatccaccagccaatttcttattctgtaaattattttgccattttggttttgtttaatttagggtgtgacagtactggcatcatatttctgtctagtgaataggagaatcagaccaccaaaatattagaggagaccctctgagttggtagagattgaagcagagctaagccctcgctggtgaccaaaagaaacttcgtctccccgtatgaatctcattcttggcaaagcccacagtttgagaacccccagcaggcattccagagctgcactgtcccataaggtagccaccgaccacactcagtgaacagcgaccacattgaagagcccatacacgacacgtttccatcagtgcagaaagttccactggacagcactgctccacaataatgaagaaaaaggaaacctgttttactttactgagtataattagcagaaagtcttatttgatgacttttctctgggtcccccttgtcaagtgtgagtcctctgagtggagagggctatagtctctccatagtaaggcagaaagacgtgcccactgggaaacacccagcaatttaatagggccctgggtccaacaccaacttggagttcttaactaatgccaagccaggtaaagtgctttgttcattgagtcttgcaactccattagtgattcaaaacaaagtaaacctctgtccctatctctgtaggatagttgcagggaagcaatagcttgtgtctgtagaatgcacttgcttttactaagaggcagtaaggaactgtctcagtatgaaaatgtgcatatacagaacgaccatccgtttttggtgtaagcaaaggggaccatgtgtgcctgttgtgcactgtctgtgcagaactttcagaaactgtcagtgatgcacaaggacgtgtgtgtccagagaagagacgcctgtgcaggctttcctggcagtctataaaggggcgagctctgtctcagtccaggctttcccacccagggttcctctggggctctttcatctcattatgtctggctattgtgacatttagagtattcaggtgaatgccggttgctgccttggtgtggaagggacgtcgtcgcttttccaccctagaatgacctttgatcttacctgtcaggacgtgatctaggcatcaaagccaccagttcccagaacgtcacctgcgaccagcataggtctgtgtctctgggttgttttggagaatatggagccttttgagatgcattagcagaagtctttttggtctgactgtgtgagattatatgtgcatgcatcaggggcttttttcacccaaattgcaaagattcccagtatttagagattagatgtggttagaaaagtgcatttccagtatgcaattgtaaagcaggaaaaacctaaagctttcaaaaagagagggcaaggcaggctggaggaggtgttcagagctggttttgctgaacttttgggcctggggaaggttccaccagtgtcctggctcttgggcttcatctctcgcagcagatctgcacagctccaactgggctatcagtgctgtgggcctcggtccaggaggctgggtggatgctgggaaggggatggagggaggacatgttgccaggtgatggtggctggctctacatgcccctgctcctggagaagccctggtgccatgtttctccctggctctggcttcctgtctatcacaggaggaacacaggtgtgatgtcagtgtgatcttcactacacacagcctttaacaaggtagcccatgacatggagagaacttatcactcctcttagagatttcctctgcttttctgttttaaatagactttctgttttagagcagttttaggttcacagcaagattgagcagaaggtacagagaattcccatagacctcctgccccgcccccatgtgcagcctttccatcagcatcagccaccagagtggtgtcacattagggtttactcttggtgttggacattccacgggtttggacaaatctataatgcgatgtatccaccattagagtttcacactcagtactttccctgcccttaaaaatccatgtgctctatctggttatccctccctggcctcaccctctggctgccgtgggtctttgtactgtcgctgtagttctgcgttctccagaacatcatacagttggaagtatacagtgcgtagccttttcagactggcttctctctcttagtaattcatgtttgaggttcctccatgtcttttcatggcttcatagttgatttctttttatcactgaataacactccattgtctgggtggaccccagtttgtttatccactcacctcctgaggctatcttggtggcttccgcattctggcagttatgaataaagctgctctaaactttcatgagtgggtttctcatgaaatgttttcatgagatgtaagtttcatgaaatgttttgtggatgtaagttttcatggtgttggggttttcgggaccccagcttacctcccacccggatggaatctcctagtgtagcatttcctgcttgtgcacagatagcgtcaagtcttgcccatggtgacagggcgacagcaatgcctgtccctgagggggcgtctgtgggcaggtgggcaggtgccgccccagccccagggggtggaggagagtccagaggtctggggctctttttccctgttagcgctcagaagggacactgtctactccatgctggggaggcccagccccccaccctgctcttcccctgggtctgggaggcatagctctggcagcagccccgttcacagcagggacttggttctaggtctcgttctgccgggcctgcctcatctctttccctgctccttctgaggtacagaacagtcaaagtccaccttggtttctgtgacttgctgggcctggaaaaagagaactggctgagtttaaatgacttcaggtacataaatattagttgctgcagtttctccaccacggaatcacagtgaggtcagtgtggagtgcgagggtgcctccctgtgaacaggcttctgctcgtgagtgcctttgtagtgtcctggtgctaactggggatgtatcctaggactttaagaactagcgcatccgtcttgggtcaggtttctcaggaaggcacataactggagtcccagccaagaggaaagatgtatgtggccagcagcagctcgctggctgcaccgctgaggggactcgcacaactctgccgcttgtcctgatggattctgtggcaaaggccaaggatggcctgcatctgaacggaaggccaggcattaaaaagcaaagggcagggaggatcatcgtgatcctttctctcctctgtttttctaagccatgagcacgctgaatttcagtacgcaaaaaaaaaaagccccctttaagcagaaaaaccattctagggacattgagagactagaaatccttgcctaatttcagattaagcaaaacataagcatttggcaaatgccgagattgtaaagttgtgcaagcagaagaatcactttgaaatttgagcgcagccccagatgttcgggagcatttccatgcgactgctcctcctagcgtgactggctggtgcctcccggcccccagcccggtccccagtgcttgtcctctgcccactcgctgcacagacctggggtgaggaagaaatgccgccgagcgccagaagattaggagggaattgtgtgaggcctcctctcaaagccagggtggctctcggcatacgcgtttatctgagtgactgaatcatagcacaatcattttggcgaccgtgggataaacgctgtgagagaactgtggtttgtccttgcgggtgtgttggttcaaagtcatgtgagtagagccagctcctgaggggatcgtctcatgctcacactgggggcagcatttgtctcttgtcagctgtgagatcagagtcctagggaagccagaatggtctctcagatcatgccctggccagaatccggggctgccctggccagccgccagatactgacccttctggtctcatccaatctaaagacaaagcatgaaagcccagccctgacgagctctggcctgaggccacccatccactcagaggcagacattggcttggagaagaaagagggatgaacttctggaaccaaagccagctggaattccttgcctctggtaggtgagccaagtgaattcaatatgtaatgaaactgtacttcataacttccctgagaacatttgtatttcaagtgtctgtcccagaacagatcaaagccctctgctaactgggattacagatgggaaaggagtggctctccatcgatcctggtgtttgtatcctgcctggaacagctcactttagggacagcagctgcttgtaggtgtctgcagaagaggcactcccatctctgcctagatgggggcatggcttagtaactctccagtaccctgttcttggctgtcgccctgtatatgccagatagtgacagtggcatcgttttgcaggaccaagtgttaagcttgctgcattttttggagttgagaaagagttggttcctggcatcgtgatatgaactctacatttatttcccctcttcctaagccagtgcaggttagttgactgcaaagagacaatgtcctgagctgtgtctgcctgtgggctcagtggggtcccggggatcacccaggcatccttttcagcctgctgggctgaaagcttggatttacaagtgattcgttttcttactcttgcacttctgctggggtagtgacggtggtcaagagaaacacatgttagtacagatgtgtattctgagtgagagggggctcacagggctgaaaacaagcccagtggggctcgttccagaacagaaagccccacactcccccatcttctcttatcatccctgttgtttttaaacattccccttatcatctcctcctctctttttaaagtgtgcgatcttgaagagtgccgtgccggagccaaatggtgtgggcaggtgcagcctgcctgcccccagcctgtccaggccgtgtgtggctgtttcccttcactgcccagtccaatctggagctttttccagccaaacaaaggcacctctgtccccttagaggaaagagagccagtaggagtatcagcccatttgccctgcatttgggacctagaaatcccccggtggttacatctggggtccctccttgcaggggcaaggtgaacgagctgctgtgagaagtaagagaagtcagagtgggtgatggagagtggggggtgctattctggaggttcccagctggagctgtttccattctaggtcttcacggagctacttcctcgaagctgggggtggcctcttatggtcccttccttaggcctggaaccaagtcctactagtgctcctgtaaagcctgtagaagcaacacaactcttctctcaccccagttctcatggccgtcacagccctcggcttgcctctgctcggctcattgactctaattccatttttgagggctgctttccgggcagaggagggcggtgggaatgagagcagaggtttccttcctgttctctgcacagcagccagtggccacctggactagagagggaggtacaggccctcaccctttcccaagcccacctgagcagcaggtacaacgtttgatctcaccacagtgagtgcaaaaccatccttcctgctggaaccaccgcaggcgcccatcctcggcagtgagccacaacttcctcctcacgtcttcttaaccaaggccagttataccctttcatgctcaaagggaggctgtcctacctgctggatacatgtttgttatctgggagaagtttaggcctctccccacctaatcagaatgtctaaaccctctgcttactaggtcaccaaaatcagtgctggattccagctctataacacccaatatgcacaactgttgttcttgtaaaattactggcattcctcttctgtaaagatatcagccccgcagatgaacagacaagtaaacaacgtcaggcagatgaactttctgctgggagaaaataaaactcgaggcacattgctttgcttgctgtacatggacaggcagagtggtcagatggaatggccatggattcgggcaccagaccaagattcaaatccctgccctacgatactcatcacctgggttaaccttctgaaccacaaacacttcatctgtaaagtgatggtaatattgccatcttgcagggttttaggatatggattagattgtatgtaaggcatctacatacctacatagattgttccatgggagctcaaaaatggctgctcttactgataacttatagacatgtaagtaatgattactactgataatgattagtgataagtagtattcatggaagaaagactcacggacacacaagacgccatgtgcatggatgcacctctcaaacgcttctttgcagctcttcacattctttgaggtatgcagtcagtaatagaactcaaaccttatatcctcggattcacttttaattaggctgttctcattaaaacgccattcctttattgtcttgccacttaatttagtaaattggtagagcaaatgtggcatgcagattgcctcttccataccagaacgtcatcattcattgccaaagcctatgtggattaggagcatttgaagtggaaattagttgagttcagggcatacagttgttgaattttgattatcagcttatagtatttttaaaattagattatgctttgtttccatttaacaaaggaagataaatgttgtggttgatgtttttattaaaatagaaatttaacaaacattctccaataactggatggattacaggagatgagacaatcaatagaggattacattttgcaaagccaatttaggaaccttgtctagataaaaccctcttgtggcagaagggatctggcaaaaatgaataaatttgtaataagtgtcaaccctggccccctgccgtgcaactcaagtatagacagatttttggagggaagatctacttccaactactgttattctgctagagagatgtgttcgcgagggattggtcacattttgacatcagaggctggccatgacaatcccaaggttctgccaaattccagtggattcccactgcttacttcaagtcccagtgtggtcaggacttcaggacttctctgaaggggagatggggcccttttctggaggatcagagctctgaagatgattggtcctcgttattcagtatgaaagcaaataccacatttcaagaagtggatggctctttttaaaataagtcaccttggcaactggaaggcacagcaaggagcgagaaagggtaagggagagaagcggggagagggaaagaatgaggaaagggaaaaagaagggtaaggagtaagggggaggaagagagagacaagacacggatacacaggagactcagcgccccttcaagcattctggaatcccccgaataatcaccactccttctcccttcttgctggaactttgtgtattttgcatttcctgttgaagtcataaatccagatcctgctctgtaaacccatggagtctgagggcagccagggccggcagaggcagaacatttcaacatgtgccgaaatgttcccacaggcagactaggcagttggggtggcaggaatccaggagcctgaactaggaggcgggtgagttgtctttgcctgagagttgagcttaaatcagccaataaaattgtccatcttaaggaagctgaaatttctaaataagcctataaataatttcacaaatagggcctgtgctgtgtaatagtgtgcactgattttgagagttactgcaagaataaatttgctgaatgaataaatctgcagtagtcgccagtcaaatgtcaaaggctggtctccagcagaaataaccttttaaaaaggactcattagctgagcacacagggcacccacataagtgatttctaattcattaagaggtagatgatcagctcatattttgcttttccagcaaataaggattcaaataagaacccttctccaactcagaaatcaggcttctggtgcctgcaaatctccccacatcaggatatgggcagacagctttattgctatcaattaaagttccatgcacaaaccttgtaatgttaagatgaggccaagaggtggcttttccctggctagattggaatttagtgagagtgggcaggcaatataaagaggccaaatctgactgtgggcaaggctgctgagctgtgttgcagagggattttcttatacccctaggtggtctcgttgaaatgttttatcagagacaggagggagcttgcagactttgtggggcttctgcttttgccactgtgcccgggctcccagcatatgctccagagagaggcctcggcttccagagacaatgcaatgggtgggaaggggaggtgtgtatttctagagtgggaaggagggccgggggccatcaggaccctctggctcatcaggtcttgggctgggagtcattgggtgtatagcaggcactgactggcacaggggcaagtgtctatgaagcaggtgacacagaggaagacaaactgaagaagatacctgtatgactccagctataggatccacatattcaccacaatgggcatttgtgtaaatgaagaatcacaaacacacatatgcacatactatcccaaagaatattcagtgagatttagaaaaacaaccaacccaagtgcattctctgttagtgattggtagcatgctgtccctctccaggaagaatattgtaggtagtggtagatggggcataagtctgagcccccagcgaagcttgaactcagctgaatgtgcatctgcactggggctggagactcctgatgtgcatggggttttggtgaggttgagctgtgtgtccgccaagctccctgagcctgtgcctcgaggagataaggtgaaggtggcctgctcttccaccctcctgtaagagtgggcatgaggatgcttctctaagctgtcaacatgttttatagatgttaattatttttgttattttaggtctccaaatatttcagagtgctaatcttttagcttttcttatgtttttatctttttaaaagtaatttgtagtatagtgacagagctgtgcaaccaccatcactgtctaatttcagaaactttccatcactgtaaaaagaaatgccatacctatcagtagtcactctctgttccccttcccccagcccctggaaaacactaatgtaatttctgtccctgtggatctttctttctggacatttctatgaatggaagcagataatatgtggccttttgtgtcttacttctttcacttagcataatattttcaaggttcgtcttggttgtagcatgtttcactacttcatgtttttatggctgaataataatccattgtgtggctagaccacattttgcttataccattaatcagtggatggacatctgggatgttctcactttttcaccatcacaggtagtgccctgtgactattgatgtacaagttttttgtggacaggtttccactgctctaggagtaggggtactgggtcgcatggtaactctctttaaccttctgaggggctgccaggcagttgttccaagtggctgcaccattttccattcccaccggcaatgtatgacattccagtttctccacatctttgtcaacattcattattgccagtctttgtgattttagccatcctagtggatgtgaagtagttttgattaatcttttagattttaaaataataatgaaagttacaactgtcatcttaatagaaggaaaaccaggttgatgatctgttgactaatatttgcaaagtgctaataagccctttgaagacagtatttgaagaaggcgaagttgatcctttctcctggaactcctttctcctggatcccaaagctgtggatccctgctggtagtaaagtagatgaaattagaattgctgcataagcgccaaatgacttgaaggagagcatgaatgtccagacggggatagagaccaactatgaatctgcctgtaactccaaggacagtactctccgtccctctccttgaggtgtgtgcaagcacgcacgctggcacactgtctcctggaaggaacggtggagctgtcgcttccccaaaccctctcctcttgccattcctatacagtaatgactagtatagacaaatacaatcacacagttttggcaaggaaaagtttgttctgggagaggcctttggcttgcgtaagagatgtttttaaaatgtgtgtggtttttgtgtcttgtttttcctagaggctagaagggaggatgccatggctctgacaaggcccaagaggtcagggaggggtcccttggccacatttcctctgcagtgctcggaaacaactcactggtctttaattttctgtgaagatcagtgtctcacttcatccctccagctggcatggctggagtcaaagtgagtcggtttacacagagtaagccaagaaatcgtagaatcccaggagtcattggatttcagggactgccatttaatttctttctttctttctttctttttttttttttttttttttttttttggagaccaggtcttgctctgtcactcaggctggagtacagtggtgtgatcatggctcactgtaatctcaaaccctgggctctagcagtcctcccacttcagcctcctgagtagatgggactacaggcatgtgccaccatgtacagcatatcatttcctttcttggttccccgcttcccccagtgacacagcccctttacaacatcccttaatatggctgctctgagtctgctttaatccaaaacagttacagaactcactcaccacttcccaaagcagcctgttccattctcagcactgatcgctagaaggttcttttctatatgcccactcatctcctggtttccaagccaggcatcactacatgttccttggaatgtcctgcagactctaccagcctggagtagtgtgtaggggttcaggtgcctgctgcaccctccttattactgcagggcaaagatgctggcccgagcagggaccacacctccctttgttccaaatcactcctgggaaaaagttcagagagggttgaaagtatgcatagtgtttccattagaaatgaatagtctttctgctttatttttaatgatattttcactgtgaaccgtaacgtatatgtcatgtttaaagaagaacaacaacaaacattagtatatctaccatcagcctaagaaatgtggagacctagaggccctccaggggtatcctgggcgtatgccacattttctccaccatggtaaaacatttaaggacacacacgtatgtgggtctacattgtttatttgattttatctatctgttcttggtgctgaatattacagatttagcctcagaaggtgtttttctgtaacttgcttcttccacccaacaaggaatcagctgtgttgatgtacatagatgtcgctcatttgtttttttatgtagtgtacagtttttcatggatctgagtatatcatagactatctacttcacagttaatgggtatttcagttgttgttgttctttttttttaatgttcatgtagaagtacatccttaccctggagaatactatgttctttggaacaggatggcttggcgatcaggcagcactttgcactcctaccagcagtggtgagagacgtttccttctgcgcccttgccgacacttgctgttgccagacttttaaatttttgccaatctggtgggtgtgaaatggcatctcattgtggtttaatttgcagttcttggattaccaatgctgttgagtcacttttcaggtctttggggaccatttgtgttcatagccttttctacaatgcctgtttaagttaacttatctttttcttgaaagatctatctgttcttgaagatagatgggtagttcttacctggtgtttactgccactgttctaagtggttctggatacagtaactgtttcagtccttcccaataaagtaggttttcttagggggacgcctgtctcatgggagagtatccgtaggtgcgcacagccactggcccagtgttccccagcaggtgaggggagagcaggggctcacacctgagcacgctggctctaccattcggttccagttcaactgctgggttattgacatattttggatgctaataccttgtttctgcaatgtgttgttaatatcttctgtttatggattgtctttttccttcgtatttaatgtcttttgataaatggaaggtttttaaaaacatttaaatgttgttccactgaacatttatggtcagtgttttgtgtcttatttaaaaatcatttcctaccctggagctttttattaacttttaaaagttttatagttttgcttttcacatttaagatgttaattcagctagaaataatattgtatataggatgaggtggaggacaatttctttttccatctagataacctaacttgccaacaccattgattaaacagcccagcctttccctgccgctggtaaatcacatcatctgcacatgtttgtgtctggaccctcccttcagttccatcggtctatttgtctattgttgattaaactattcttttgtaattactgtaacttatttaaagctttgatattttagcagggcaaggactttcactcttccacatacattttaaatcaatttgtcaagtactttgtcaagtacttgaaaatcccgtcgagatttaaattggaaatgcatttgaactatacatcaagttgggagaaaattacagcttttctgagtcctcttactcaagaacatcatatttcttgcaatttatttaggccatctttaatatcttttagtaaaattgcataatatcctccataaaggaaatgtacatgtttggttaaatttctacctagtaccacttaaaatagcaacaaaaatataaagtatttttaattatatattttagctacttgtgcatggtagatagaaaagcagttgacttttacatatacataccacttcccagtgttcctgttttcatgtttgccctttgcataaattttcttttgtgtcagtttagcaattcatttctttttcttgttattatggataccttcaaacatacacaatcatggagggtctaggacaatgaccctgtgtcaggcgatatccagcatcagcagctgtcaacatggtgccaagcttattccatatgtccctccactttttttgttttttggggaatcctttaaagaaaatcccaggcatcatattattttatccttcaatatttcagtatgtattaccaacagatgaagtcttaaaacaaaaaacagccaaaccattgtcacactgtcagaattaacagtagttgcctgatattagtccatgtgtggatttccctcatagtctctaaaatgtctttttatgcttgttttgttcaaacctggattcaaataaggtccactcatggcataggattccatctctcttacttctttctatttctggaagttcctactcttttccacctatttccttcatgccattaatctgttgaagaacatagtccctttccctggagagctgccccacccttgactatgtgggctgcatcctcatggtgctgtctcccctgctcctccattccctgtatttcctgtaaactggtagttacatctgaggacttggctagattcatttgtttacacatgtttgtttttctaagaacactttctaggtggggctgtgagcctctgatttcgacagtgcattcagaatcatctttgtactttctaatctagcgttccaggttatccaggatgcctaggtcatggtactgatataggaagggaattccagaaacagcgtgggatgatgccattcaccattgtatgctcctggtcatcactgtgtcctgtgatctgtcagtatggtcttcctctcccccacatttgtgtgtgtgaaccacagtggttcatgaccactttggtggcaggaacatgaaaatatttcacctgaacacagtgttatccagaggtggaatgtctgagtgtcaaatatatccctggactcccagttgccttctccatgctctgagcagggctgagagctgaggcttccctggggttgttaacggggtggtcatgacaagcttggccacgtccttcctcccacgtcctggtggctgctctgtggtcttcttgaggaattggccatgtgtccacagaggcagtcatcttagtccagtggcctggaatcctctcacatttcttctgggaatatttatctcttccttttcttactctttcatctccaaatgttcccctctctcctacattggtttctctcgtgtggtttctctgcgcatttgtttggtgttccctctgtgctcagccttctcctggttttcccaattaccaggtccagtctctgaccagaccccatgaagcctggttgattgcttctaaatctctccatctgagaaacatcctggagatgtggaaaaaaacacaactcatgagaggaaaagacttttgcattgagagcaaatccgcatgaggaaaaagtcaagccccaaagaatcaagtggacctgcaggtggggttattcaccaagactttttcaatgagatgtaaatcagtggcttcaaatggttccagaggccatggctggagcggtgtctttccctctgtgctggctggagaacaactgaacacatccccccattctcccttccctgcactggggtgcagccttcctgcagcaagtttcagaggtggaaggctgatgataagtctggagctgacaggcctccctcaagggaggacactttagcagagagatttgcacatttctagaggctgcaagagggcagtgctcagcttgatttagagccaagaagtaagaaagcaggaggaaggtgaaatgaattgcaggagtgtgacacaaaggaggctggagatgccttttcttacataggcccagcctcactttcagcccaccttcaacccagcttcagccagttttgtaaggtttggaactgcacaagagagaaataaaagttatatgaatgtgaatggtttccaaaagtctctctgcagaacctcttaactttaggtgcagataaactgcaactttcttcaatgggttcttggacccctagtcatggtgacagtttgactagcattgagagaatgttgaccagaaaaagtcaacatccctggcccttacaaaacattgaatttcatctaagtggagtaaatggtttaaaagtttaaaacatgtaatgaaatatatgtagcacgggcatgcatttcctttgctcccactctggggcagctgtgagatacttagagggaacatgctggaaggaatgtcttctgcccagtgtctgtcccactggaatgtgtggtaagtctccccaactctgtgggttgcagaaagaagaatgttgccttttcctcaattttggtgtgcatttcagatgttattgcgaaactaaagaaaaggggcaaaattcttctcttgtgcctatctctctccgtctcttccttcttttttttttcttgtcttggcatatctcagaattatccaagactttcatcctgttgattattccttagtcatgtatattcgatacattatgactctaaataaacattccatcttccttacgaactttgtaagaatggggggcagggggtgtccccccttgtattgttagatgtctagtacctcacacaggcctggcacagacaagatagtcactgtttgcatgggtggatggatggatgcatggtgggtcaatgggtgtgtggtggatggatggagggagagacggaagggagggatgatagattgaggagtgatggatggatggatgaatgatggatggatacatgacggatggatgaataaacaaataaatggagagatgggtggataaagataattcaaatacatacacagatacacaactggacaccatcattccccacacactcctaaagaggtgtgtgtcttctccccctgggtttcatcaataagcaggatccctcttaagggaccaattcctctggtaagggtctgcaagtcactcatctgtgtctggcaccttgcacagtgtgtgcagtggaagtccccagcaagtgtgtgttgaataaaggttgtgccatgcattagttcatggtctaagtccatataaaaagccaggtgtttggagttactgtagtatctgttgactttcacccaaaatctaaaaaagactcctcagcttttccttccagcatagcagaagctcttccaagatggccaggagataaactcaaaagcggtttcattcttccccatcctttacttttggatctgttccctggagcatggggaatgccgggtgtcttatttcttgaagctgaaatttcctgatattgtgtacagacccccacccgcctgtcccgcagggctgggtgccagagcaagattcaggaattggccatcaaatgagttcctcatttgcaatcaattaacagccacctggcctgttttcctgcctccctcctctccccttctctctctccccttgttttgcatcatgaactgattggagtgtgagaactggggccttaaccaggtttgcaacttctccctgccaggagcactttctcccaaaacctcagggctcccgcgtctactccttcaggccctttctcaccctcctgaatttaaaattgcaacccccaccgccttccaatccccttctggatatattttctctggagtacttacggtcttcactatactacgtacttttaatagtttattttgtgtatgtctctgtccccttataaagtgtatgctcccttaaggtagagatgtttttatctattttgtttctattttctttatctattttgttagttcctagaaccatgtctggcacatattaggtggccaataagtacttggtgactgattgaatgaatataatattaagatgattttttaaaagtctcgtgttcagatctttgccaggggcaccctgtcatgcccctggggtctcccctgaggagagacctctcaccagaggagctgcagtccactgcctctctggaggggtttgcctgcaccctcagcacctggccgatcctccgatgggtcttcctggtgctgtgactgtctgtgactagtcgtggatgccggctgagcctgggagcagcggttaccggaaatctgtggctttctgctttagctaaagagagaagactgcatgtgtttgccagtcttttgggtgcttctgtttagcatagacattggccaaggctgctggtaaagagcaccagagaggcgctttacccatgagagggaagcatctgcggcccggagccctctgcaagctgcctcatgggacccctaacagaccttcttgcctctctgagttcagggtagaaacaacctgctgatccgtctgtttccctctggcacgccaactctctcctgagagagctcctcctcctgattctgtgttctgagagttgcgcccaggggtgctgcacttgctccttccttctcagcctgtagctcagctctgacactcccgcgactcccccagcaccccgagcagggtgcaggtcttcctggacgggcttggggctgagtgcagcagaagcagcacaaggctcctttgctgcctctgcccctaaggagtcccaggatgtgtgaggaacagagctttctcctgtcccgagctccccgcagttcagccctctctggactagacagttctgcatttcttagctcactgtgctgtgctaaggaagccagggctgccccgtgggtggaacatcctctaatttgccaggcaggaaaggatggggcgatgagtcacccttctgagtgattcctgccgagcttcctacagaacatatccaggagcagccaccccgcccccagggttagtgtgtggaggcacaggtgctagtgtgggtggtgagaaataggactcggaatcaccctttttaacgtgcacagtatgttaattgtgtcctcacaaaagtgttgaagtgtttcttgccttatagaataaatggtcagaaaccagtggattcctttgagctgttttgatgggaggaaattaactgtgacagtgagaccttggtggtcccaacatcagcaggatgcagaagacagcctagcctgctgggtcatgtattcgtcttcggcagcctgggattgggaatgcgcgtgagtgcagagctgctcactgcctggtgccctgcagctccagtgctgcctcagtgcgttccaggagagacctcagtttccagccctagctcaagtcccagggttgatcttgctcgcggcagcaccaggcctgcacctcggaaaggcatgatggacttacctgtatctatcaggttcaggcattctcctgcctgtagttgagaattcaagttcagggtgattagtttcgccttttaaaagagccctagcatatccttgctggatatattcattgctgaaatgcacaagaaactgaatgtgatcaatgtaatgtattggtttcagcatcagatgttaagaaagtgaatctgttgagattcttgcttttaaaaacacaaaataaaacaagcctaaccttagtcagtcatcctggacttgagatcacatttcacagtctacaaagtgaggtttcacgtatagcataccccacctgtttgtgtaagtaaagttttattggaacacaatctcacccactaatttacatggaatctctggagctctggctgctacaatggcagagttgaatagttacagctaacactgatggcctgcaaagccaccttgctccactagagacaaagtttgctgaccgctggcatagaagataagagcacaaattctgaaaccaaactgctagagtttaaatcccagctctgccacgtattggcagcatgaccttgaacatgttaattaacctctgtgtgacttagtttcctccactgtaaaatggagataatatggagataataatatctccattataatattaataattataattatgatgatataataatgatatcaccaaaataatacttgtctcctaaggttgctatgaagttcagaagaattaataatgaggacatgctcagagtactttctgacaagtggtaatgtgttaaatttttaaggaagtgggcaggtttctaagactttaggaaagtccagtcgcttcctcaaatcacagacagttgtgcatttgaagatcacctcaaaaccaggttcagaggctcacgcctataatcccagcgctttgggaggccaaagtgggaggactgtttgagcccacaagttcagcctgggctgtaacatggtgagaccccgtccctacaaaaaaatagaaaaaattagccaggtgtggtggcatgcacctgtagtctcagctactcgaggggctgaggtgggaggattgcttgagcccaggaagtcaaggcttcagtgagccatgatcacaccactcgacttcagattgggtgacagttttttttttttcctttaaaaaaaaaaaaaaaaaaatcttaaaaaaaaataaagaccacctcatcatcagggtacctcccataggaaacacagccttgtgggtgtcttggcttcctgttggtccagaaccctgcggactttcctcgcaataagggcacagactggcttggctaaaggaagggtgctagtggtgccagccagcaggggaaccctcacccgctccggggatgccagggatggagtgaggcagccacagtgtccactgcgctgattccagcaggggatggcagcatggtgacaggaagtcacacttaataatgcagacaagagggaaaggagacccacagacacagggagaaaaagctgcaatatgcctcttcaactcatgagaacaggaggcgatgggccacagaggctgctgaaggagtttgttcctgcctctgtttttctctctccttctccaactagaatgttatgtgccacttgctcccctcagtagcacttccaggacaggtggactacatatttgtggaacccagtgtttttattgagaagccttctttttgctttttaggctggccttcctggaaaggttctgcttttaactctttgcgtgccttcccaggccatgcgtcctggtgcgaggctctgagaacgcgatttatgtcaccgcgttggcgacttacatgtgctccctgatcattgaagacacggttttgtctctgcctgggatcatggtggtcataccactccctgcttcaaaaccgaacatttcgtgttttcggagcagattcgtcaggacgttttgcagcatcctggggtgttacctgttccttgcgcctgatctagagttccgaggcctacgcacctcagaggagcagctgtggggactgtggggcaaggcccctcgcccgtcccacacgagaacggctctttctagcatgttttctcaggtgtctctttatcctctccctatgcctcaagtttccacattgaaaactctcaatggcgtttatttccttctgagtctctgctgggctgttccagcccttccacagcccctaccctgggaagcccgtacctcttccacacgccacctcctctctgcccctcagggctgggacatgctcgtcgactagccctcgctcatccacgtgtccctcagttaccttctcgatgatgacgttctaagatttcaccctatccccatcccagtgttcatgtcccctcccctggtttatgtgtccccttagcacttaaccactttctgacattctctagattttacttatttgtatgttttgttgctgtccccctggctggaacataaactccacccgggtggggacctctgagtgttttgttcactcccaaaccccacgccagaaccgcaccccacaagtaacgggcactcattccgatttgctgactaactgcataaatgtcctaaaaccacttcctaccttacgcggctgtagagaggataagaatgaaagttaaataaagcctatgaaaatgcttagaaaacttgaaagcataaagtgaatgtgaaagatgtatttatgaatgaagcagctcaacaaaaaaagacacttgggggctgggagtgggatatgtcggtgagactgatagcacgatgttgtcgagacattcgggctgatttaagtgactggcaacatctggaacccatcaggaaaagctttagcgtagaaggcattcctctccctacattttgaaaattcaggcaggcctagtaagctctttaatattttaggaagttcaaaaatatttaatatcttaaagaaagtcaaaaatacttactactctgggaagttcaaaaatcaccacgtgcctagaagctggcctgcaggagaaggattctccctcactggggaagaggtgtcatgctgggaaggctgtcttgttctctagactaggtaaaatgacaaccaaagacccatttttactttaaaatgagtttacaaagccacattaaagtgtgaaggcttcaagaaggaatttctcacagatagaacagaaaataactggattgactcactagcatgcaaaatacatttggaagggaagctgccaccaataagtttctcccttgggtacaaagaaatgtcctggtgtgcccacggctagcacgtgctgaggactcgctgtgaggccccgtgtaccccgcaggctgctcttgaaggaaccagtttccaagggaggaggatgatgccagccctgggcagtgtttccaccacgttgaggcaaatgctctttgcagcaaaccaggagagcatttgtttgtttctctgcagtgagactatttgcattaataacttacttatgaagtttaccttaagtctgtaaaagcaactgcaacatccaattttgtggagatttccattacaaagttggcaaagcgttttgtaactaaatatctggagttaaggatttatataaatcaacatggaaatggggtgccgagggaccctctcctgctccaaccgtatccgtcaacacctggtgcagtgaagaattctgctcagttcctcctgtcccagagcaaagggcagtctgcatccctgacagccagaccatcatcctctgtgggcagcaaattgcagaattagtgtaaagcagacaaatgcaatatctatgtgaaataagcccaaatcattaggtatgctttgattcaggcttaacattttttaacataatagcaaaccgtatttagtatcctaaatgtaaattcaggacttgtagttttcacatttttgtgttatgtatcttaaatgcctttctagagagggaggtacgaactggctcatagggtgattttttcctgagattggccacatgatttaaagatttgtaaaagcctttggacctatctgtattgagaggtaagagcttgggctcccttggtcctgggaccctctcctctccccacagcagggctgccgggagccctgggtgcagggtgcatcgggctgctggccccattgtggccctgctcccatctgtcctgtaacttctctgcatccaaggctaggtcctcctgtgtgtggtgtccttagcgccttgcactgtggccaccccctcgcatatggcgaaatgttttcctcaaatggtgataagggactgtgcaggcaagggcgggagtcctggaggcacccccggtcacaggatcaccctcagcgtttccaccctgcccaagaggtctgtggagcttccccgagcctttagcacatttgctaggaagtccatcctccattggtggaataaccttcctttttagaaccttcttgaatggctgtgccatatgctatcagcatatgccgtatgctaccaggtgggttatcttggtggtcaagtttgttttgctaaggtccccctttttttttgagacagggtttcactctgtcacccaaactggactgcagtggcataatcatagctcagtgcagcctcaacctgctgggctcaagtgatcctcccacctcagcctcccgagtagctgggactgcaggcatgcaccaccacgcctggctaatttttgtattttttttttgtagagatgggattttgccacgttaccccggctggtctggaactcctgagttcaagtgatctgcctgctgcggcctcccaaagtgttgggattacaggcgtgagccaccgcgcccaggctccttctgtttttgatggagcttgccagtctgtgtgtcatgtgatgtggagaactttagtaaacacgctgtgtgctgctgtctggtagcttcccgagtcggaagttatttgctaccaacaggagaccatcctttggtacttacagtgtgccaggcactgttaggagtaactcatctgtattaactcattcgatctcacatttaggatccctgtgagacagatacttagcacgcttgttttgcaggtacggaaactgaggcatggagcaggcagggtgtggcagaattgagctcttctgcaagaagcttcatggccaccctcaaaactccttgagcgctggggacccagttctaacacaggcctccttccttttgtcatttgagccagattcttagggaaactttttttttttttacatgctcacagatactttattttttcttacctttttgtattacacttgacccttgaacaatgcaggagttagggcaacaacccccggcacagtcaaaaacctgtgtgtaactttttatttttattttttgagacagaacctcactctgttgcccagactggaatgcagtggtacgatcttggctcactgcaacctctgcctcccgagttcaggcagttctcctgcctcagcctcacaagtagctgtgactacaggcatgcgccaccacgcccgactaatttgtgtatttttagtagagatggagtttcaccatgttggccaggctggtctcgaactcttgacctcaggtgatccacccgcctcggcctcccaaagtgtgtgagccattgcgccaagtcttgcatgtaacttttgactccctcaaactcaactcctaagagcttactgttgaccagaagccttactgataacacaaacagttgatcaacacatatcttgggagaactatacattatatactgtgttcttagaataaagcgagctagagaaaagaaattgttatttaaaaaattgtaaggaagagaaaatgtatttactactcattaagtggaagtggatcatcataaaggtctacatcttcatcatcttcacgttgtgtgggctgaacaggaggaggggttggctttgctgtctcaggcagagaagaggtagaggaggtggacgggtaggcagagaagggaggcacactcggtataacttttattgaaaaaaatccacgtataagtagacccttgcagtttaaacccatgttggttcaagggtcagctgttttttgggggggtggggggtaacatgaaagtaatgacatgaaaaatgtatatatagtaagatgatgtggtggttggtttgggttgaaataaggacctacaaggaatcctctgcctttagtcccctccttctcttccctcctgtcctcttggtcttctgcggtggctggagatccaggtccccagtgcaaggccccattgacctgaggccacccacaaaggaggcccacgtgagtgtgctgcccaaaaggccggtggaaaggtggtagatggggccgaccaggcatcagctggattcaggccctggagggtgcctgggtggggctgcaggggttgccggtagcgaggcctttgttccctgggagggatcaaggagcacttttcaaggtgcctggtggctgctggggacttgctcaagtactcctctaagtacccattatcagaacatgcctgggaacactgcaaataccagctcacagcatgggatctcttcccagaaagtgaggaagtgagcaatgcatctctgaattggataaatgtaaacagatctggaccctcctggcccaacggatgactgacccacagctgccctttcccttccataattaaacagataattatcagggctccacagaggcttccctcgccttttgggggagtgaggaggaggcaggtggttggaagctggttgcccagttacacgctttgtgatgctgaggaatttgcccaccttgctacatttttctcacttataaaaggactataattcttatttcacaggagtcctgtgagcagtaatcgggttatcgggagtgtctggtggggagtagcagctaaataatggctgagttactttgagggggtgatgtgtgtagctggcagtgcacaggttgggaggtcagaccacctggatccagtcctgtctctcggaccttggacaagttactggacctcactgtgctccaatttcctatcggtaaagtgcagataatataaggccaagctcacagggttgctgtaaggatcctgtgggtctcgcaggtagaggtaggagcagcaggcacacaggaggtgctcaggacaggaaggggcaaggtctggatgagagccccagtactgctggaacccagagaagcacatacctcaaccctgagggtgagagaaggtttacacccaaggaccatgcattggttctttgctgaattcacttattcagtgaatatgggcagatgctggaggggcggtcctcagttctcccatctgacttttgctgcagtgcatgaggagggatcaccactgaccacttcctacacttagaagcatctgcctttcctggccccggcacccagggtcctggaacatctgtttgcctcagcaagtagtcaatgatcattgtttttatagctcctttttcattaagagacacaaagctcttttcgtatcatcagttttattctcagcatactaagaagcacggaagggcagatttgattatctctgctttatgggaaaactaagcccaaggtactttgtcaaaaggtgcattctaaggccaccacagatgacctaaccgctgctttgatgcaacagggaaacaggccacaacaaagtctgggaaaagtaaaaaaaggaagaaaaaaaaaatttgcttttaaatcctctccaatctggctgcaacatgaaaatgctacaggcagctcttagctgtagacaatttatgtcttcacagttgcatccacgcaacagcttagtagtggcctcgtcaccctgtgtttgaagggcaagtcgtgttttcatcctttgtcttatttcatcaattcttcatcaattcttggatgaatgagtgtgcaaatatgggaaaggaagaaactgacagaagaaaagaggggacaaaacaaaaagtttggacccaacaagcagctttgaatgagaaaaagggacaaaggaactcgaaatataattatctgtaaaacaaaaacctgggaacctctggttgcagtgtgataacagtaacaaacttcttcatcgcggattaaatctataaagtggaagatgggatacactctggtaaatgcattatttaaaataaggtaaggccaagagttgtgccttttctaaatctgagagtctctgagttgaaagtgcttttcaaagatgacagcacataaatgataaccctcaacagtgctatgaaagtcagtgccttggcttgaaaaatgcttacgagctaaagaaattgtaaatacacctgagacttcctgagtgagtcagaatataagctgagctgtgaatgagatcccaaaatgtgttggctcagataagatcaagtttcctttttcttacttcatggtatgggggtgtgttctgcaaggtcaccccaagacccaggtttcttccccctttgctctgggcataatatttgatggaaaaactggcccaccctactgtgtctaccatgcagcccgtgggaaggcagatttccttatgcatgtcatcataaaacatgctccagaatgtgcaggaatcactttcacttgcattctgtggacagaaatgtggacacctacccagggctgcctgcaggcaaggctggaaaatgaaggcttctgctggaagcttgatctcagttgaaatttggaatattctgacagacaaaagaagcagaaagtgggtatcaggggtcattagctgtctctgacccattctcagaccccgcagtgcttggtgtgtatacaattagggtctcacccgccggggcctatggacgaatgtgttcatcttcctgacacttttctgctggccacatgctgtgctatacaggtctggagactgcaggtgggcagactctgtgtccatctataactctgggcctttgcatgggctgagcccctggctggaatgccccacttctcatcagccatacctgggattttccccattccgccaggcccagctgctattagcaataggatcttgggcaacatggactgtgaatctcatattttgggaaaaataatgggccaaatagaggctgtgagccaaggccccagtcccaggggactggtttgctagtctgtgtgttcattcgttcagtagatatatggagcgtatgatctgtgtcaggccagcagcggagcatccaacagtgagcaaaacaggcgagaatctgtcctgatgggctaattgtgaagggggccctccattgaaagcaggtggtgagagccgtgacaagtgctctccttgaaagattgcatccttagggtcttaaacacagggagccggtgctccacgctctccaccccagcttgctgggaggtctggaataggccagttggggttgtgccctcccgacgctgcaggccgactctggcacccgcccttactcaggggtacggcttgcctgagagtcccaaccaggggtgtcaggagcacattcattagagcctgctgccacatgcctgattccagtagaagccggagatggcgccgttgtgcccacgtgagcgccatctccacgggtaggacattaagtccagaggaagatgtgtgtgccacatctgagtaatgagccatgaaattgacattataagttttaattattattaatgccttgcaggggtggctgatgttaattgtcctgtaggcatcccagatgggttttccttttttcttttatttctttttcttaatgtcttgagcccaaataatggcggcttagtgacaatgtttgaatggaattcctctgaaggggagcacgccgcagtgtgagaagttcttccaaacacgtctgtgggcagaaagcaaacaggctctggagcagctgcccaccctcctgggtgggtgtggaggctgggacatagaggcctccaggttgctgccgtgaaatcagcagaagtcttttctcccccataatagcatctgcctgccttaggccccttccatggactaattagttaatcttataaagggctttgaagatgaaagactctggaggtgccgggtgtcacccatgtgagcatttcctgatgagatccagtttctggctgcttctgctcctccaaataaactgcctctcggcatcttccttgactcttttttttttctttccctcagaaatgtgtcctgcatcttaaaaaggttcattccccctcttggttttgctctgtccaatctgagtctggcagtctgagatggggatacagggggctctcttgccttctctctcccaccttctctgtcccctacccttccccacttctcctcctggctcaccagccagcaaggcaaacaggccccacctgagcccccatgctctcacagcttgcttgctccgagaatcatgctctcagtaccagactcgagcccagcaggtgggttggggccagcaggtgggttaccacctgtggagaggtggccaggcgtacaatctccagtctgcccctgcttctgccctgctcctgccctggtttccttttttttttttttcttagacacaggttcttgccctgtcacctaggctggagtgcagtggtacgatcattgctcactgcagcctcgaactcccaggctcactcagttttcttgcctcagcctcccaatagctgagactacaggtacttgccaccatgcctatttttaaaaaatattatttttagagatagggtctcagcgtgttgcccaggctagccttaaactcctggcctcaagtgattttccatcctcagcctcccaaagtgctaagataataggcgtgagccaccatacccgtccccagatccttcttttgtaactttcccccctgtatccccatccaggcctgactcaggactaacctgagtgcctttgaattaacagcatatagaggggacctgctacgcagggagaacactcctgggtcctggggtcatcagagtgaacagcatagtctcttcctgggggccttagtggcgtagaagctaaggaattaggaaggtggccgatggagttaggatggctggtgagtggctgatgggtgctgatggaattaggagggcacaggtggtgacgggggagcagtgtggattttggagggagtgagaagggcagaggaagtagcatggagctctgtctgcaaagccctgcatgttccaggttccagaagcacagacttctcgtgactgaggatgctgtctgccgtggctgggcaggtatgctgaggccagcgtaggggacctcggctgccgtgccgaggagctcggatcccctgaggtcatcaggcagacactgaagctcataagcagcaggtgcatgagcttggccctgcatttgggcatccagcccatgacaggctgatgggccaggagaccactggaggaggtttgcactgggtgcaaggagagatgacaggcaaggcagtgggagtgggagggtgcacagccctctgggtgaaagctcagaagtggagttggcaggaggagtgcccaggccaagggaaagggtgggcacagggatgactgaaggtccttgccgagcagctgagtggggatttcatggccagaggaggtagggctggagggacagacagcctctaggagcttgcagatgtccagcagagccgtcaagcaggcatctgggttcacatcaagtcccatgatcagaggggacatcacaggcacaggttgatttgagagccactggcacagaggcaggtttagctggggtctgcatcagtgaaggggggtgtcagggaggcctgcaggccacagtgctgataccagtgaggccatggtccctctggagaattcatgaaagacagaatccccgtgactcaggagtgtgtgtctcgcagtgtctctgtcctgggtggtggcctacagccccaggctgcctggtggaagatgcctcagtctctctggctctgcaccccagctttacctgccacactacctaagttggggccgcagttacacaatgtgggtgtgagtggtgtcttcaggtggcctttatgtcaaccagtctagagaaggctgatggtggggaggccagaaaggaaacacagtgtccccttctcgggggcattgcagggagatgtgtgtgctcagatagcacgagccggccgcagaagggagtgcagcgtgtaggcaggtgcaaagctggcccttcctgcccactgttgttaccaatggtagcaaaagtcgccaaacagccaccgagtctgtagctcttataacacggcttttaagcctcacccttgtggtttgggaatgaagggaaatggagtcattccctgacagataaaggttttttgtgtgcatcttgttgaggctggtttttcaacttcagagcatgttcttttcttacatcccttcaaaactgctcgccttgatggatatctaagtgtctccatgtagccaatagtgaaaatactcccctcatgaaaataaatgttatatttaacttttaaagtattcgtagactaagttctattagaacagggaaccttactctgtcttttttgtaaatttaaccaaacaggctgggccagggtttcttaacctgctgatggctctgggccaggtcattctttgtggcagaggctgtcctgggcattgcagggtgtttggcagtgtccctggtctttacttgttacatgttggtagcaccccaccttccggttgtgatagccaaaaaatatcttcagaccaaattgtcccaaattaagattccctggctggcggctgagtggcccctgtgtggcagtggaattattctgatggcctgcagccaactgccccttcccattttttctgatcacagtgcttgtcttgcaaattaccccttgcctccgctctctaaaattggggctcgttacacactattgtgctcgcactacaaagctatccagaatgagtattattggaagcaaacggattttttttttctcttcgagttctgcaatgaaaaatcctctggtgttactgtttaattggttagtggtggctgtttgtcaatttgccagcaggctctctcttaactgctgtcgtttgacgttgctgaaacataaatgtagaatgattgagttgccaacatgctattaagtcctctacaaagagtttttcgatgtactactgcttcaggcttttgtgcttctattgattgattcgaatactgaagaactccttggcataggcagccctggtgagaaaatgcggcttctggtaggaaaatcgttgggtattgacacccgaacaatgcaaagctttcctttggttttcctctagcacaggattgacctctggcaaagctcccacagttgagcaggtattggccacccataaaggaaaaggagagaggcccatgaggccagatggacttgatgagacagggccagttagagaagcccaggaagtggaagaagacatcacatcagtttccggattctttgacaggctccttattgctgacaagcagaagcagcttagaatcttgtttggatttcagagctagtcacggtttgagaccgaggatggcagaacaggtgcagatgggttggttaacctctgacggatacaagaacatcactgttaggaggatacagtcttatgcccttgaacaattgtacttctggaacagactgctacaagtacatgcagcagaaagctgtgtgtcatggtgggggggtctgtgatggccggggactgcttgttagaacccctgctcctgggcatggcccctgtgctccacacaggctgtttgtcatcatcctcgtgtgtgtaccgctggccatgagtcctctgagtggaacgctcagcacgacggatgccatgcacgcctgctgctcagcttcaacccctggagcatgctcgagttgctgtgactattcagtagatgaagtaaagaaaaaatggttggatacttgctagaagtctggcagcttcttagactaaaatccctgagaaataggagccagtggaaaatgattcagcatagagtattgagtaagaaattccgagcccagacctcctgggttcagattctacctactgctcctaggtgtgggccttaggaaagtcaccttccctctctgtgcctcagtgtccccatctgtaaatgaagacaagccagcacctacttcagagtcctttttgcacagaatgaggttgtctgtgtggaaggcctcagacagtgtcctttttaggaggaatggctaggatggggaccctcttatctcagtggcgcctcagaatgtgcatgttcctgtgacaggctgtttctttaaaatattttccacttgcggggcactctgtatgcacccccaggacacagaaagcccctgagaagccccggcctgccccggcagatccactgtggggcattgggaaggggcatgcccggtgaccacatgctgtctgttgcttgcagaatccctgcctgcttccctatggcaaggccctctacagctacgaggggaaggaacctggtgacctcaagttcaacaagggggacatcatcgtcctgcggcgcaaggtggatgaacagtggtaccacggcgagctgcacggcacacagggcttcctcccagccagctatatccagtgcatccagcccttgccacacgccccgccccagggaaaagcactttatgatttcgagatgaaggacaaagaccaagacaaggactgtctgaccttcaccaaggtaaggtgagccccggggtgggccccgccagcccatgcagcctctgtgccacccagggctcttcccagccacagacctatagccagacagtctttcttcagagtctgaatcctggctcctcccggaaccctgggcaaatgacccagcctccctccctgtgcttccatgaatggggtgatggttttttttggttgaatgctatggagggcaccagcttgacacacagctccagcccagagctacataggagcttgagataatataagcctccatcagcaccaggagcagaaccctcagttaacctgagtcatggctctaagcgctgacccaggtgcagcagaatgacgcctttccaggactcttggggtcctgtgagaggggctcatcaggggaaactgctacagagaccctggtcagctcacagggagatgatagctggggtctcacatctgtgcatcacagccctgtcctctagggcacctgaggcagggccaccctggtgcgtagggatccctgtgaagcaaacatttgggagcaaacaaaatagcactgacaggtgaaattgagtaggagggttgggtgaggtgcagaagagactggttctggctgtcctggcagttgctgttgaataatcatctgcaccaagtgctcggccaataagctcacacttggtctttacagctgtcccaggttccaggggaagtagttggaacctcgttttctccatgtgtaaaccaaagctctgagaggctttgtaacttatccaggctgcttgctgggtcctctctccctcctgcttccccttcctcctttccatcttcatctcctgtctcttgtgtctcctccatcccctgccactgctgcacctgctccccgccgcccccagatgtaaatgacagagccagaatcctaatgcagatctctgatgttaacactcagcattcttcccacctccctacacagggaattcttcccttatgtcggcctcactgtattttagatgcccagaagttgttgttttctctctcctcactcgttctgtcttgcctgtgtctctctgtgtcagtatttctctctctctctctctcacacacacacgcacagagttgtaaataacagaactagaattctaactcgaatctctgcttctaaagcccacatccttcctgcctctgagaggccattgctctctcccccatctgctgagtgcagagctcgaggtggcactctctggagggcggtaggagaaccatgcacagtgtttttgagcaaaattggcatgtcctgcgtacagctgctatttatgtcttgttctattgttcagcctgacaatgaataatctatttttcattcagggattcaactccttctcccttccttttatcaaggtgttctgatgctaattccgattgtcatctggctgcacagcttcccgggaaactgcactggtgcctccctccctccccactcagtcggagggcgagagcaacagcttcctggggctatttttaggcacacagaaacccaacttgcttctctgcccagtggactcttccccctaagagaagacctgggaccactggtgccccaggtggtcactcatgaccaagagcagggacctctgaactctcagggtccggtcagggccttgctaaggagacagaccccataatggctctaggcttctccaggcttggcgggctccaggctgcagagccgaggccctcctccaggggcctcacaggaggaggctctccactcgggagaacccactgtgaacgggctgtcgcagggccctggagcctctgggtaggcctgcttctctgggcagaagtgactgcctgcctttcctgtcatcaccatataacctgctgcattccacgggcctctgcccaggatgtgcaaccccaggctgaaggctagagcccactggacaagaggacaaagggcacctgcccatttattccacagaaacataccgggccctgactctgtgtcgggtactagacctgctgctcttctggagcccagagtcaggtgcgggagacaggccagtggagaatgtgcagaagacaggccagaggctcacgagctgcatcggatcaccaggggcaggccgggcatttagtgtgggctcctgagtagtcagtgatggaattccatgttccatatttcacaagaaacagtgaaattagagccatcaggcttagactcattctgcggttggcatgtggggtgggggtagccgagcaggggtccatctgttcccaagtgggcaatgtcaccatggctgcccaggctctctggaaggtgacctcttggttgaattgaggtcagaggcgccagccacgggaggcccagcatctcctgttacaggatctgtgacggctcccacagcagacaagggggaagtgtcatatcacagattctttgttcaaggactttctttacttgaatcctgtgagttaatgtggagaattagaggcctctgggtgtgatccccagagggacttgtgctgtgacacgaccttcctgccatgctcctatgcccactttgaccctctgacccccaaagggcgaggtcgggcagagattggccacccctgctacctgttctgtcctgttgcatctctcactcctcagtgtccgcaaataaaggctccaagagacatgggcaactccatgtgactctccgctcagttcctgttttcccccacggtgggtccgacccaccttacttcccccatgcctggcatgcagctgagacgcacacactggctctgacaacctccatgtgaatcagacctccaggaaccaaatgattccagtgctgcagcgtaggtgctggttcatgccagcttggtctcccctctggggaatgtttttattctttggatatgttccattcctgagtcagagaggaaagaagggtctctgaaagctacaatggtataacctgcctttatacagcatcactgtggcagactgatggagtttaaattaggtggatcaaagcaagatttttacctttggtgtttgcttttgaatagtcctgttaaagtggcattaattaaagtccttctaaaatctagtttctgctttatttcagaagagaatgaataatcagtttttgtaaagcagctttaaaaagtgatattttattacttcttagtagcccgactccagaaagctgggcatgtgcaaataaaaagacgacaggcaggaagagctgtgggcccagctctgccagctggtttctgaggagcctccacacgtgctgggccagtcacccgggaggggctggccttggcagggccttgcagtgagggccccatgccagctgtgtgacttagggtgacacataacctttctgggccaggagcacctcgccttcccagtctcaggatgccagtgtgcactctgtggtgtgctgagaaccacatgatataaataaattgtggagcctagggctgggagtgcaggagaagaatgtgaactactccattgtttgagcagctaactctatattgtcttactcagctcacctgcaagattcggcaagggtttattgaacctcttctctgtaactttcagttaatgaaaacattgtggtcgccttgccaggcagctgcatttgctatgcagggcccacgctgcttttcatgagttccagctgggatgctcaggaatcctcagaggccacggggttttctcagagagtgcccgctgatcatggaatcacttttgcacatgactgcagcggggcccccaggcttgccatatcagccctaatccctaccaggtgtgccatgtgaaggagccacagggcttggtggctgcagccactgtgctgtcctaaccctcatctcaccctcgatttgtcctgatctggtcagaccttaagactcttccatgtgaccttcttatgctgctgaatgtttaatcatttctcaaaagtatgggaagtcttacctttgtgaattaacctagcattaattccaaactctgctcctctgatcctagggacagacatagatggataaaaatcaaatatagagttcaggctctagcatgaggtagacacagattcaaatcatggcacgtttctttaataatgcatggtgactcgaacatttacttagtgtttgagttgctttttttaactttaaatggagttgatattaggattacatgagcaaaggcattttaaaacccaagctcaaaataggcattccaataaatatttgctgtctgccctctcctttcttcctgtctcaggaaaagttgcacttccgtcagatggtacatatcactttttatgttagcccagaatactcgcaggaaagtaagcctccctcctaaagacagactgcatggagaatgagaacttgcaggactggtctgctatgcttttactttcctggtggctaaatctcagagaggattgcctgggggtagcggagctgagccccttgtgtggaggccacggtcccctcaccagcagagccaggcgatgggcaagcttccaaatttgcagtgtcgtctctgcttcttcctgactgagaattgggatgactttgggggccgagacgatgaggaaactttagctttacctctttttgtatcatgagataagcttgtgcggagctccacgtcgttctctcccttcctgggcaccccgcttgggctactttaccctgaagttacccgagaaactcagggaaccagttctcctttttggctccttgcttcgtggatttctcctcctaggctcagtgcacctgcagccacctctgtgcacaatgatgcctcccacgaaggaggctcaactcgcagggcacggggcagaggggagcagagcaccctcttagccactacagaccaccctcgcccagccccttctgacagcaaagggagtttggataaactgcacagataaccgttttgatttgcaggcaaagcttgggctgtatctgaagctttgccagaaattttcagaacctacacagaatgtgagctcctctccatgggcacgcctggctcctgggagcagtcctggccctggccgctgcagctgccccacctgctctccactgggtgccagatccacctctcaaatctgtgccacatggagcctctgctcagagtcctcagtggctctccacctgtcccggagtcatggcaaagttggtgctgcccacaaggccccacctcacccagtccttgctccctcaagggcctgatccacttctggcccccggctcattgcctgcccagctgcactggcctcctggtgggttctccctgcagccgagcccactgcctccctgggcctgcatggctgccttccttagcctgggtgcccccacacatttatagctcgaccctcgtcctcagcaaatctctgctggaggtgggggctaccctctcccgctgtgggagggagcaccccacactgagactccctgtccacaccctttctcctgagaggtaggtgttcatagtcacgtgacaccgcctgcctgagggtgggttgagaccccaccaccgcctggccccaacatagggcagcaaggggcgcctggagggacgtggagggaagccctaacagtggagtggggtgccctgtgtcacctggccagggctggcaggcctgctgggtgagagtgcctctgtctcctcacccaggcttcttggtccattccttcactcttcagatgtttatcaaccctagactgcgtgcccaatgccagggatgctgtggagtgcactgcccttaggcactcagaacccaaagacgtggagacaagacgagagagtctcccctgcccgtgtgtgcatgcgtgtgtccgtgtgcagtgggagctgccggcagtgagagggtgtgatctctgacatctcttccacctgtggccgcaggttcccctcagccctcagaccccctgaggggcccctgcctccctctggagttcagatacgtgaacacgatgggaacaccagaggaagcccctagatgctctggaaagtcagagccccccgaagtctcagtgacagcaggacaaagatgcagggccagcccgctaggtgggggagctgatggtggctaacagttccataagtgccccaccatagatggcagtcggctgtcagaggcacagttttgggttatttctgcaccaaaaggctgagggagtttctgaactattccctttttaattttcccttctccctgcgacacagagtgggttgggccctgtgtgtgtggctgacctgtgtgccgccaacggatactgcctgtgtcaggctgggtcactgcggtggagcaggcagcccatcaccctgcaggcccagaggctgaagggggcccggcagggtcaggggccttctctgggctccagcttgttattgcttctaggaaaccactcgactgcatgtgagccagaaaagtggcgcagcgttcatgtggcctccaggagagcagggctgtgggccactcatggccaggcagggactgcttctggcattttacatgtgattcttccacacagttgacttaggagagggaaatcttaggcactggatgtgggtttatccagagctgctgagggagctctccaaggttttcagtgatcgtggcatttcatgctgagctcccaaatgcctgatatgtgagctgcgatatttgccaagatgtgcctttgtagtggtgtcaaagggcagtgtgctccgccagccacctccagtggcatcctaaagggacagggaaggcgagcgtcggcaccctgccccgcagcctctgttcttcacaaaggcgcatctgtgtctgtggctttccttctccccaggtggaagtgaaaacacagactttggaagagctagtaaatgagtttaaaatgcactttaaagactccttgtagatggcaggtcctaccatgtcacctgaatcctttgtgaatgtagtatttacgaagcttaggaagaaaggtgatatagttttttagtaaccactttatgttcatagctcaggcttacacttaggaagaaaggtgatatagtttttagtaaccactttatgttcacagctcaggcttacaatcctttaggaccaccctgagaccacctgaatacaaaggagagccactgccatatggtaacggcatttggtgtattttcaaaacttggaaataccagggaatagggaaaacagcatatgaaagtctacgggcccacagtgagtaatgagcacttgacatgaaacctgtaaacgaaattgagctttgtatctgaaagagaaattatgttgtggaaacaagtttcattcataaaattcttgaatgctggcatattggcccaggaacttgtctgcttcatctgactcttggtgatgcctgtggtttctggtttggtttagttcactcatctacatcaagcaagggttggtggactaggactctctgaccaaatcctgcctgccaactgtttttgtaaataaagttttattggtacacagccataattcatgtatgcataactgctgtcatgctacaatggagggttgagtaattgacctacaactcctgaaatagtctctggctctttctagaaaacgttcctgacctgtgacatagagcacagcactatcagggccaagggcacaggtgttgtccctgtatgctcccttcagcgtggctttcctcttcggccattgggagcctctggtattgagtgtgcatctgttgggaaacagtgagtggagaccctggggacgccctcctctgtgaagcagcaacttaacacgcaggtccatgccatgcggatcagtcttgccgtcttcatatacaaagcccatttggtgttttgaggaggggtatttctccatatactaatgagtctgtgaagcagctatttcctccttccttgtccttctgaaagcaatggctccaggtttttgtaacatgaggacaaatcagagtcctgttgtgatctagccatgaaaagttgccattgtttccctggtcctgcattgggggtggagaatcattattgtttccagaacacaccagatttatgctggtagccctaacatgctacagtgaatgttttcattgcccagcactcaaacattcctctttggaggttgtaattattgtgggagtttgggttagaggcagagctggggaaaccttccttgacattcttagagttaattatggatttttaggtacagggagtggctgacttcctgcaccccagtattttcccagcccagcctctacaccaaaatgactgccaactaaataggaacattctagatcccaccgccctcctgaggtcccacacagccacagaaaccagaatttcccacattgatatttgagccagaagagatgcctgctgccaggtgccaccacactgcagctaggtctatgttggacttgcctctctagccagatggagccatggcagggtccactgctcattcactaatctcacagtagcacgacactcgacatgcttgggttttagatgccacatatggcagcctggtggggttttcatgtgctttctcaataccagatgctgaccttctctttaccacaggccccctcctcctccttgggaggggatagtttcttcctcagccaaaggcccatcccagggcttggcacttaggagatgcttgaatatattggtgacgtgatgaggagcaacctgaccctgctgaacactagtagtgatggccaactcctggcctgtgaagtacacccatctttggacagccctgcctcacagggagcctgcccacattgcagtaacatggggtccttggtgcaaatcccaccctcctgggtgactgaaaataagcctggttcttcagcatggtaatgatgtcaaagcttaaagacatgatcacggcccccacagcgctctcacttcccaggctgagccatcccacctccttccctggcttgccatgactcggttctggactgttccgtgatggtccacttctgcagcacagatgtcctgtagagacatgctagcactgaatgcaacattcaaggcatgctgctgcttgtccatactggatagactgttacctttttaaaatttttttttattatgttatatataatatatatttaatacttatacataacatatcagaaagttcactaatcataattatgcagcttgatgattatcacaaacaatatattcttgttttttgttttttggttttttttttgagacggagtcttactctgtcgcccaggctggagtgcagtggcacgatctcggcttgctgcaagctccgcctcccaggctcatgccattctcctgcctcagcctcccgagtagctgggactacaggcacccaccaccatgcccggataattttgtgtatttttagtagagacgaggtttcaccgtgttagccaggatggtctcgatctcctgacctcgtgatccacccacctcggcctcccaaagtgctgggattacaggcgtgagccaccgcacccggccaacagaatatattcttacctagtgatgaaatgatggatactggggctcctgtgcctctgacagttaccagcccgcccttcccgcatgtctactaacactacagatgagttgtgtttgctcttgaccttcacatcaaggaatcacgcaggatttatttttgtgtccaactttgttttctctcagttttatatttgtgagctatacccatgttgttgtagggcactgtagtttgctcattttcattgctctgtggtgctattttagatttttaaaaaataggtgttatatttttagagccgttgtaagttcacagcaaaattgagcagaagatacagagatttcccataaacctctgcccctacatgcaaagcctcctgcattgtcaacatcactcaccagagttagtgcatttgttacaatcaatgagcctatattgacaaatcgttattactctaagcctatagtcactcttggtgcagagtctactgatggagatgtcatgtatctaccattataggcccatacaaagtaggttcactgccctgaaaatcctctgacctgtctatccatccctccctcctccaccacccctggcaaccactgacctttgtactgtcttcatagtttttcctttcccagaacgtcatacggttgaaatcatacaatatgtagccttttcgtaatggttgccttcacttagcaatttgcatttaaggtccttccatgtcttttcatagcttaatagctcatttccttttttatcattgagtaatatgccattatctggatgtaccacagtttgtttatccattcacctactaaacgacatcttggttacttccatgtttgggtaattataaataaagccactctaaacatccatatgcaggtttttgtgtggacataagctttcagctcctttggataaatactaaggagtgtgattactagtttgcatggtaaaagcatgcctagttttgtaagaaatttccaaactgtgttccaaagttgctgggccattttgcatttctgccagccgtgaatgagcgttcctgttgctccacatcctcatcaacacactacacactacactgtcttctttggtgaagtgtcttctttggtgaaggtctttgactcaccattcaatcagactgttttcttgttgttgagttttaagagttttttgtgtattttgcataataatcctttatcatagttgtcttttgataatattttctcccagtctgtagcgtgtcttctcattaccttgacagtatcttttgcagagtacaaattactaattttaatgaagtctaacttatcaattctttcttttgtggatcatgcttttggtgctatatccaaaaagtcattgccaaacccaagatcatctagattttctcctacattatcttctaggagttttgtagttttatattttacatttaggtctgtgatctatattgagttcatttttgtgaggggtggaatgtttatttctagattttttgcatgtggatgtctagttttcctaccactgtttattttaaaaactatcttttctccattgtattgtctttgttcctttgtcaaagatcagctgactgtatttatgtgggtttatttctgggtgctctcttccattccattgatctagttgtctattgcattgccaatgacagactgtcttcattattgtaactttattttcagtctcgaagtcatgtagtgttggcccttgttcttctccttcaatatttgttggctcttctaggtctcttgcctctccatataaactttagaatcagttggtcaatattcacaaaagaacttgctgatactttgattgagattgtgttaaatctatacaacaagttgaaaagaactgacatcttgacaatattgagtcttcctatccatgaacatgaaatatctatttgtttagttctcctttgatttctttcatctgagatttttaattttccctatatacatcttgcacatattttgttacacttatacttaagtatttcatttgtacctaagtatttcatgataccatttacatttatacctaatgtaaattgtatcatgttttaacttaaatttcatttgtccattcctggtacaggttgagcatcactaatctggaaacttgaaatccagaatgctccaaaatccaaaattttttgagcaccaacatgatgctgcaagtggaatattccacacctgaccttatgtaatgggttgtagtcaaaatgaaggcacacaacacacagtttcttcagcatcctcaagggaaaaaagaccctcccaggccccttcagctgtgatatttattttccacacatgcccagattcccccatgcaagcacaaccataaagggtcataaaatggcacatgtgtaggctgcacatgccaatggcaggttctccacgtgaaaagagagatttctatgaccattgttgatgaggcagatgactgcagaaaaatatttttaaaagccatccagcagaatgtttcctcatccacagaggacccacttactggtcccttaaccacttctgatgtttccttgcaccaaaaaaaaaaaaaaaaaagtatacacttaccttttaatcaaagcacagcatcataggtagagactgaaagcctgccattgtttgttgttgctgttgtttaacagctgatacaggtattctggagaggctactgtgccgcttagttactctgaacatgtaatttttttcactgtattaataatatgtcatattttttactgctaaatacttatgtgtgaataattgtaagaaaatgattgcttattggtagcatataaatccagagtcagaagtgaggctgatgccaaacaaccacagatggtccgcatgggtgataccctttgctttttgtaggctcgatgtacacaaactttgtttcatgcacaaaattattaaaatgttgtataaaattaccttcaggttgtgtgtataaggtatatataaaacacaaatgaattttgtgtttagactggggtcccatacccaagatatctcattatgtatatgcaaatattccaaaatctgaaaacatctgaagtccaaaacacttttggtctcaagcatttcaaataaaagatactcagcctgtatataggaaagcaattgacttttgtatattagccttgtatcctgcaaccttgctataatcaagtattagttctagaagttcttcagttggttctttcagattttctaaatagatgatcatgtcatctgtaaacaaaggcagttttatttcttccctcccaatctgtacacttttaatttccttttcttgtcttattgtattatcaaatatttttagtatgatgttaaaaagcaggggcagagagtacattcttgccttgtccttgatcttagtgggaaagtttaaagtttcccaccattaagtttctcgtaattaggtgaactgtaggttatttgtagatgttctttatcaagttgaagaagttcccctctatttgtagtttactgagagtttttatcatgaatgggtattggattttgttaaaagctttttctgtatttactgatatgagcatgtgatttttcttctttagcctgtggatatgataggttacatttattgatttttagatgttgagccagccttgcatacctgggataaattccacttggctgtggtatataattctttttataccttgttggattaaattttctaatattttgttgaggatatttgcgtttatgttcatgagatatataggtctgtaattttcttgcaatggctttgtctgctttggtattagggtaacgttaacctcatagaagttaggaaatattctttctgcgaagtattgagattgtagagaattggtataatttcttcatttatatgtttggtagaattcactagtgaacctatctggtcctggttctttctgttttgaaagtttattagttgtttattcagtttctttttttaaaatggagtctcgctctgtcacccaggctggagtgcagtggcgcgatcttggctcattgcaacctccgcctccctggtccaagcaattctcctgcctcagcctcccaagtagctgggactacaggcatacgccaccatgcccggctaatttttttgtatttttagtagagatggggtttcaccatgttggtcaggctggtcttgaactcctgacttcaaataatctgcccacctcagcctcccaaagtgttattcagtttctttaatagataaaggcctattgaattatatatttcttcttgtatgagttttagcagattgtcttttaaggaattgttccatttcatctgggttatcaaatttgtggacatagcattattcataatattcttttatttttttaacatccatgggacatacagggatgccccctcttttattcctgatattagtactttgtgtcctctgtttttcttagtttgcttgctagaagcatatgatttttattgatctttttaaagattaatttattgatcttttttgtttcattgatttttctctattgttttcaatttcattgatttcttctatttcttttattttatttattatttgcatttaatttgctctttttttcctagtgtcctaaagtgaagatttagattatttattttagatcttccttcttttctaatcgatgcattcagtgctataaatttccctgtaggtgctacttttgcggcatctcacaaatgttggtaaattacatcttcatttttatttagttcaaaatattttttaaatttctcttgagagtttttctaagacccaagtgttacttggaagtatgttgttaaatctccaagtattttgggatttccagctatctttctattatggatgtctaatttaatgctattgtggcctgagagtagacattgtatgatttttatttgtttaaatttgttaaggtgtgttttgcagaccagaatatggtctgtcctggtgaatgttccctgtgggcttgaaaagaatgtgtaatctgctgttgttggttgagatattatgtggatgtcagttgtatccagtagattgatggtgccattaagtgctattaagttcagttatatccttactgattttctgcttgctgtctctgtccatttctgattcaggggtgttaaagtctccagctgtaatactggattcatctacttctccttctgtcagttttttgcatcatgtattttgacactgttgttaggtgcgtgtaatgataaggattattatgtcttcttggggaattgaccccttcgtcattatgtaatgcccctatttattctgataacttttctcactctgaagtctgttttgtctgaaattaatatggatatcttttgattagtgttagcatgttatctctttcttcattgatttgctgttaatctgcttgtgtgtgtatatttaaagtagatttcttgtaaacaacatatagttgtatcttgttttattttatcaacttaaaatttttaatttgtatatttacatcattaattttcaaagtgatgtgtgatagagtcaggttaaattctaccatatttgcattattttattatatttgttgcccttgttttttgttatttttcctgtctttcactctttttcggtcttttgtggtttttattgagcattttttattttctattttctctcctttattagcatatcagttgtacctctttttttacttttttaattggttgcattggagtctgcaatattcatttacaatgaattcaagcccactttcaaataactgtgctgctttgcaagcagtatgagtacttgtaataacaaaataatacttatttctccctcctgttccttgtatcattggtgtgattcatttctcttgtacatgagcattgtaagtgtatgtaaacacacacacataagcataaaatgatcaaatacattgtttttattttaaacagttatttgttaaatcaattaagaatagcaaaaataaaagttttaagtttactgccattccttctctggtgcgttgcctttctttctgtagatctgaatttctgacctatattatttttcttctctccaaagaactctttaaaaacagttcttgcaaggcacatctactggcaacacattcactcaattcttgtttgtttgacaaatctttattcatgcttcacttttgaaggataatttcacaggtacagaattctaggttggtaggttttttctgtcaacaccttaaatattttactccactctcttgcttgcattttcttttgaaaattcaaatgtaactcttttcctttgctcctttataggtaatgtgttttttcccctctgacttctttcaggattttttctttatcttttattttatgtagtttgaaagtgctataccaaggtgtcatttttctggcatctatcctgcttgttgttctctgagcttcctggatctgtggtttggtgtctgacaataatttggagaaattctcagttattattgtttcaaatattccttctgttcctttctatctttcttctccttctagtattcccattacatatgtataattgccccacaattcttgctttgaagttgtcctgcagttcttggatgctccattatggttttttttttttctaattttttttttctgtttgcttttccatggtggaggtttctattgagatatcctcaagctcagagagtctttcctcaactgtgtccagtctcctaataagcacgtcgaaggcattcttcatttctgctacagggtttttgattgctaacatttcttttctggctctttatctttgcttacatcacccatctgttcttacatgctgtctagttcaaacattaaagcccttagtatgtgaatcatagttgttttgtatccgtgatcttttaagtctaacattagttgccacatctcaatctggttctgatgcttgctctgtctcttcaaactgtggggttttttgcctttcagtatgtactgtgatattttcttgataccagacatggtggactgggtaaaaagaactgctgtaaataggcctttggtgctgtgggggccatgcggccacaaatgttctatagtcctgggatcaggtctcagtctttcagcaagcttgtgcccctggcctgtgaacttccccagtgcttctcagtttcccccactcctctgtaggtgaaacaggatggctacagtgggttgaagtttggtatttcccttgcccccagtaggtaaggctctcataaaaccccaatgggggccagatgtggtggctcacccctgtactctcagcactttgggaggccagtgcaggcagattacttgaggtcaggagttcgagaccagcctggccaacatggtgaaaccttgtctctactaaaaatgcaaaaattaactgggtgtagtggcacacgcttgtaatcccagctacttaggagactgaggcagaaggatcgtgagactctgtctcaaaaagaaacacagacacacacacacatataaaacaaacaaacaaacaaacaaacaaaacatcccaatgggtgaggctgtggttaactagtttatcctgtatgtggatcttattaagcacagaatgctctggcatgtttcacagtggttcctcttcccctccccctgccagaagcacgagtggatttttctctgatattcactatgaagacttagtggagctgctccttgaggcacaattcacaaaggtgtgggccccccagtgactgggcccctgcagttcttacctctcaggctgtccacactgaacctccagcacacatcagttacagttcaggccctcctagccgagcactgcttcccacggaggctgctgcttggggatttctggtatttccctattgatctcttcaatttggggggcagcagtttgccctgtgacctcagttctcttacagatctaagaagaggagttgctttttcagtttgttcagcttttttactcattgttaagatggagtggtgactttcagcttcttacgttctagactgggagccggacacccccctgttagctattgaatggtgtgtgtgctaatacacctttaacaaccaactcctaatgatagttactgtggcggttgtatttaactaaaagccacagacactgttttatttcattgatcttcttatcaaggaacatttatgttatttagtttttttgcctaaatggagaaatgtacaatttgcatgtatctgtggtcccggctgtcgactgtacttgtgaactatgatcctgccatcgcaggtatccatccctttcactgttaaattgcctggaaatcaactttctttacaaaagaaaagtatatttttgatatttggtttttcaacatttaaaaaaatttcagagtggaaatatacatgtcatttagaagcacaagaaaattacatgctgcttgctttcttcctgaatttgttttctggcatataagacaattctgttatgaaactattaaatacttggtattcactgagattatttgaaaaataggaaagaaaaaataaatataaaagtgttccacctcttctatctcctagagttatccattctttaaattttggcatatatattttcaaactttttctaggtatatatatatttaaactttcttaagcaaaaatagtaaaattaatgatgacattccactttatgggcaccatgcaaatgggtttgtatcttactttgcttttttcgtttaaaaataactatcaagtccactaagtaaattacagtaaattcatataatggaatgtctctgtgtagttagtgaggaagatctatatgtactgtcactaaatgatctttagactaaattaagtggaaaaaagcaagatacagaaaagtgtggtgagttcactaccatttatatctttctaaaaggcatgaatgtatgtgtgcatatatacgtttatgcacgtatacatatatacatacttgaggagaatatctctgtacttctctaaggctatataagaagctttatggctgggcatggtggttcatgcctgtaatcccagcactttaggaggctgaggtggaaggatcacttgagcccaggagtttgagaccagcctgggcagcatagtgagaccttgtctctacaaataataatcaacaaaattagctgcgtgtggtggcacacgcctgtggtcccagctactcaggaggctgaggagggaggaccacttgcgcctggaaagtcaaagctgcagtgagctgtgattgtgccactgcactccagcctgggcaacagagcaagacctcgtctcaaaaacaaataaataaataaacaaaaagaaacttattaatgattgctttgtggaaggtaagctgaaataccagcgatcaggactgggattcgttttttgaatttattttattttattttttgggacagagtctcattctcgcccaggctggagtggagtggcatgatcttggttcactgcaactttcacctcctggttcaagagattctcgtgcctcaccctccagagcagctaggattacaggcatatgccactgtgccctggtaattttttttttttttttttttttttagtagagacagggttttgccatgttggccagactggtctcgaactcctggcctcaagtgatctgcctacttcggcctaccaaagaactgggattacaggtgtgagccactgtgcccgtcttgttttctgaattttttactttttatttttatttttagatggagtcttgctcttgccacccaggctggagtgcagtggtacaatctcagcttactgcaacctctgcctcctgggttcaagcaattctcctgcctcagcctcacaagtagctgggactacaggcacacggcctcatgcctggctagttgttgtatttttaatagaaacggggtttcaccatgtcggccaggctagtcttgaactcctgacctcaggtgatccaccgacctcggcctcccaaagtgctgggattacaggcatgagccactgtgcctggcctgttttttgaatttaatattaacatttctcttttaatttccattatttctctcctgtatcatttttaatgactgagtgtattccattgaatgcacaatactgtaatttatttaaccagtccccttttgctttgcatttgtctctagtttttctctagtttaacaaacactgtaatgaatgtcttcagtaacaaatctttctgcacacttgatttttcttagaatagagttcctaggagtggctatttgtagctcagagggtgcacaggcttccaaggctttgatatttgataggaatcaccgaactgcctgccctacatttatatccccaccaaaaatgggaaagtgcctgttccatgcatactggccaccactgtgagttgggtttatgtttctcattgctaatttgacaggcaaaggaacaaaaggggaatcttcctgtttaaaactgtgtttgtttgaatattagccaggtatgccattttaaaatatgtttaatggaaatttgtttttcttctttcatgagttccctgatttttggccttggcctatttttctcttaaggtatttgtctgcctttccactgtttttttaagtctttatacagtaaagacattaagcctttgtctctcatgtatcctgcaagtatttttctgtttatttgcctttttgttttgtttctgttatttttaacattgagtatttagttttgctgtagccaaatctttgttatcataccttgaaatacattccccagttcaagattaaacatctattcatattttcttcttggacattcaagtttaatccttatggaatgaattttggcatatacagtggattagagaactaattttatttttttaatgattggccaattttagtaacattttctaactgattattgctggtatatgagaaagccaatgatttttatgtatttatcctaaaattggcaaccttcctcaaattcttattctaatattcacttgcttctaatttttctaggtagaaaattatatacctttctttctaatatttatacttcttgtcttatttttctatttatttggctctaatttctagaccaatgttagataccagtgtggatatcatggtattttctttaaaaaaaaaaaaaaagaaaaagaaaaagaaagaacgaaagaaacaaaattaatctggcattttcttctttttgtttttaatttttataaaattaaatttctatcttgtgatattttgctgttgtgacagctctgatgtgtgggaagcctttggttatctctccctttatgtgacagcgaagccttaggcccttaggctgatctgagctgggccaatcatgccttgggcctctgctggtggtgagcttgagaggcaagtcaggcacagatttccggagcattctgtgggcgcctcccccaagccagggccccactctagtgtcctcgtggtgtttagaaaagccctcccacacttggccgggcatggtggctcacgcctataatcccagcactttgggaggccgaggtgggcagatcacgaggtcaggggatcgagaccatcctggccaacatggtgaaaccccgtctcttcttaaaaaaaaaaaaaaaaattagccgggagtggtggtgagcacctgtagtcccagctactctagaggctgaggcagggggaatcacttgaacccaggaggtggaggttgcagtgagctgagattgggccattgcactccagtctggcgacagcacaagactccgtctaaaaaaagaaaaagaaaagaaagaaaagccccacacactcaacgctgagcgttgctggagggacgctctgctaaatgcccccagacctgaggctgacttttgggctgtgtgaagtgatatgatgctcttagaatgctctttacgtttttctggcctataatgtcagttggaaaaagtggcattgtaaagtcataaatctttttggtttgggtgtttttgaagctgggggttgggggagaggatggggaaagtgaggggtgtgattgcctctggtggcccccacgctctacttgttctcctgggagagggcggtttggaagaggcatgggaggagcttcccagcacagagcccagcctgccctccttctgtgtgatcccacatgggctgtccagctctgttagatcaatgctgcctcaactcggatggacaccaaaccctacggccccctccgctcccggtgaagcagtttctctgatgatttcttagaccccaccagcctaaaacatctctccctctgaccccaaaagaggcctgtaagtcccgaattgctgctttgtgttacagcatcagaggctccttggaaaggcgggtggtgcactcagctctgaggggcttctccatgaggccatctcttggccatctcctccttagcctgttcaagtcacacatgggccagctggtctagcagagaacaaataacgggggcagtttaggctgacaggccttggggcgttccatgatgcacctgactgccgaaggagggatggttccggagaagggaacagaggttcgccaaaggccccttggagtggcacccgtcttgcccaggccattgctgtggtggtctctgtctctgtctctgtctctgtctctgtctctgtctctctctctctttttcttttttttttttaatatggagtctcactctgtcaccctggctggagtgcagaggtacgatctcggctcactgcaacctctgcctcccgggttcaagcgattctcctgcctcagactcccaagtagctgggactacaggtgcctgccaccatgcccggcttatttttgtctttttagtagagactgagtttcaccatattggtcaggctggtctcaaactcctgatctcaggtgatcacccgcctcgacctcccaaagtgctgtgattacaggcatgagccaccgcgcccggccatctgtctctcttgacacttgttacagctgttttctccttcccccagggctcctctctggtcacgtcccactgtgagtccccatctctcctccgtccttttcctctttctcacccgccctgccattcgtctctgtgtctcttggtacctgtgacagtgtcctatttccttcctcgatgactgctcatctcccagtctcaacccccccgaaagcccgcctttcctccttgctgcctgcctcttcctttctccttccatctgtttccactttgtgcatttatacttggtattgtttaatattccaaagaattgaagagggttactgaaagctttatgtgcccatgactctaaataaatgtagttggactgagttatttttttgttcttggatgaagccagaatcttaaagccttttctacttagctgaatttatttttattccaaatatttttatttcattaaataaataataggagttgcattttaaagccctaactctgtggtacattgccaggctttcccatatggggctctttgcagctataatcaatagtgtcagagagggtgctggctgggttcggtggctcacacctgtaatcccagcactttaggaggccaaggcgggcagattgcctgagctcaggagttcaaaaccagcctgggcaacatggcaagacaccatctctaccaaaaaatacaaaaattagctgggtgtggtggcacacgcctgtaatcccagctacttggaaggctgaggcaggagaatcgcttgaaccccggaggcggaggctgcagtgagcggagattgcgccactgcactccagcctgggtggcagagcgagactccgcccctccctccaaacaaaaagaaagaaagagagggtgctcctgggtgaagatgtcagatacctgaatggataatgcactcttcttgaactcattccttggaatctcttccgagcctccacagtactaaccagtgtcttgcttcctttttcattgtgtgtgtgtccgtatgcttgtgtccacggtggacccggaactgcaggacgagattctgacggtgctcaggagagtggatgagaactgggcggaaggcatgctgggagacaagatcgggatcttcccgctcctgtacgtggaggtaagaccgtgccgccctcccacacttggctccttcttgcccacccttgtttcactacagtggggtcacctgaccttcaagccccttttctaagagagaaagaggatcctccacaatagcctctggccagagagctgctatgtgtgggctttgattcacctcatggggtcagtgctgtgagcactgccttggccagttttgagtggctggtcccaggcctggctgcaagtcatctcaccacgtgggcagtggcagcagggcccccttgtgcaccttccccgttttctcaagggacccctgcgcctggcacccatgcttctccaactcccccaagtgctgctgctcttttctcatgagcaccagaggggaagaacccgtcccaaggcagcattttcccttcccactgcacacggattggaaggaaccgttgctggccatctgcaaagtcctccttggactcagggttattgggcaactcttctgcctgagaggcaccacagcaaaggtgttttgaggctaattccagacctactaatttcctttcccttttctgtaactaaagcaccaggtttctagtgagtacgtttagggtagctgctgtgcagaaagcatcttaacacgtgtgtctttaaaacacctgctagcctggggctgtgtgtgtatgtaggagtatttgcctatggcgtgtgtgtctgccatttgtcagtgcaaggccacatgtgcacattggtgagctgaccacatgctttcatgctgtaaccaccagcgtcatcccataagagtggcttcagtgaatgcttactgagtgcttgttgtgtgccagacacttggaagtacctgctcatttaatcttctcagcaacactggcatatgaaaaccatgaatggccctgctttacagatgagcaaacagaggtgcagaaaggtaacgtagcattctcaaggtcccacagccgaggagtggcagaaccaaggtttcagcgcgggcctcttggccctagactcagccagcccttcactctcctgctctcacaccatatcctgcctctccactgtctctggctaatgaactgcagtttactcagctcagtgctgggctccatgtgtcccccctgcctgacacacttaagggcttcagagttggcaccgaaagcccacgggtgacacggccagctttgccacacctaccacacagtgtgcagatacttaaagatgtttgtttaaaacatctgtcaattccccgttgcctgcaggataaagtccaaatgctttagcttagcattcaaagccctttgcagttagtccatagtctattttgcagcctcatctctcatttcctcccctcttcctcaaatattcgggaccagtggttctcgcacatttagtttgaatgtgctgcccaggccatctgaggccctcccacagcaatggcagataattcacacacacacactctcctgtaagattcacatctgccctcaacacttcgcaagtttccatgtatttgcacatttgctttagcttttctgtcctggtgcttaagaccaaagaacttaatgcgcgaataccacttacaatgtcgtccagaagtcagaaatctgagctctcggacatttttagctggccaaacttttttctccaggcagaatcttactgggatacccaacatatacatgaatgttcatggaaagttcattacaatggccctaaacagcataccactcaagtgtccatcaacagtgggatggctgaggaaaatgcagtatatccatacaatggaacgctctcccaccatgcatgtgaacaaaagagtaatggctttaagggcataggcaaatctccaagtgaaatttttgaaagaagccagacataaaagtaaatgccgtatgggtttttttaggaggttcaaaagcagacagaactcctctgttgtgacagaagtcagagcagtagtgaccttggggattctgactggaagaggtaaggaggttctgggctgcagaaaggtttcgtgtcctgatctcgggagagctgcacagattatgctgctgtaaaatggtgtccagttaagctttacacacttctaactgcaatttcaaaagctaagagcaaatcttaaaggacaggtaagatcttaccaaggcagctgacagtagcggaggtggctgaaggctgcgttgggcccctcagcccctcctctggaagaagctgtcaggcaccattgggagtccgcaagcaggtgcaggcccgagacccagtccagcaggctctctgtcatctcttcctggttccacaggcacactcagagacaaactggggagtcagccgcatctgtgccttcctgcagcatgactgcctgtgggtctgaaaagccaccttaaagccctcctccctcagggccatgaggagggctccatagccccacctgcccccacaccccctcacaggttctgcctccactcttgggcacagtcccttccacccacctggataggaagccctggactgtccttcaggctcagagacacagacctcctcccaagcatccttgggcagggggccccactgcccctcttgcccctttctgagatggctgcccatgcagtactgggctccacgccacacacccatagcctggcagcctcagctctgatacaggctcccggactctcagcagccactgaagaccagcctgaacaggtgtttcctgggacttttcattctttatgtactgactgcttgcacgccacacaccacatggatcctggtggatcggaaagtcctggtttggcccaaactgcttccctctgggaggccgcacaggcatttgaggtgggaacttgggtgtttgcagggttcctgagagagtcagacccacctgccaggagggagcctggagcttccatcttgggctactgcacaggcagccggcacagtcccggtgatgcttgtcccctggtgcaagaaggaatgtagcagacccgtcacctcacactaagaggatatcttctttcatgctcacgtaagcttggattgcatgaaggtctcctccacagccgctccagccgggatctgcaggcacctggcagggttctacccagcgcacagctgccctatggggttcaccgagggactctcacctcgcctggcctcacctggcctcagcttcccatcagcgcagctcaggccatgatgctaagcccacggtggacctcacaaagtaaacgagagtgtgccctgcacagtgctctccctccgtggttgtgtctccaccagggcctgccagtggcacagtgagctgaagggcacacacctggcctggagccagcctggccttgcactgcttcagctgctttcagaggaggtggaccccgccctggacatacgtacatttccctctgctgttctatagaaataatcgtctctccacagcccctggcacccacctgccacaggcattcacccatgagctgggcttgctgcccctgggcactgaccccatctgtgctgtgctcaccggagatacctcactccctgcccagctcttcttcccatggctccagccaccgtcccatgccctggaacctgcctccttgtccttttcgcccatcgttttgcaaaaggaagtgagaaactctcctgcggccgtccccacgccaggacccagggcacgtctccctgacacctgttcatcagatgccagctggacagcgccccttgccaggagcctaggctgaccctgccccagtgtccactcgggcacagagaggagtgggcctggcctctcaccctctggaactctagtctagcggatgggacaagaactaaatccaaacactccaccgggccttccttctgggtctttagcccttgaggtttttcagaatttcagaaggcgcttgttctaaggggagtgaggatgagccagtctgaggaattcctcctccccagtgggccagggcagagtgaactcacaggaggatggcaggcgagggactccgtcatccagagttctgccctctctgtggcatgagtgccggggctgagcacccctgcagcccccctctctttctgcacagggtccaagttgacctgcttggggtcaggcctcggcccagccctcagctgttgagaacagggcccattcctcataggccctgatggcaggaccatgagcagcccatgggcagttcagggcgatgcgggcttcagagcagacctggctgggcccagcttgtcctacatcacctgcacattgggggcatggcctgtggtcaccccctttaccttcctgagcctcagtttcccccttcaaacaagggcagtggcagacgtcatgggctagccatggggcatagagaagataagaacacacaggctgggctggctggggtaggcagagagcactgtcctgtgctggtggtggtggtgtaaatgtttgtggagtgaaagctgctcctcggtccattgctgtgttgattgaagatcactgtgtcattcctgagcactgaacacatttggcctggttagctgaatgggtttgaaggcagggcagtttcctgcctgggtgaggtttgcagttggatgatgtcaacaataccaggacacaggtccagggtgtggacgcttaggagaggcagccctcttggaagctgtctttaaggagcattgtcaggaaaggaatcagctcgggttggagagacttgggggcgggacacaggctgcctctggctgctcacacagagcctgggtgggtggcttgcatggagacttagaaggcatgttagcaaatacgccagtgattctcgtctgcgaggaaaacctctccatggggccaggatcgtgatccaaaaatagttcaaaaaaatgatgaaagacagtagacacaagtgtcaagctctgcctccacattgacaacatcggttgtccaggtagagtaatggggagacccagatctcaaggaaccaactgaaaaagaccccccagagatagtgctttacttatcctcaataggatattcagaaattggctgctccctgtgttgctggtgtgtgcgtgagtggtcacctaggtagaccctcatgccctcaccccacacgtgcatgtggtggcatcccaaggatccttagagacagccagcatctcagcatctctgacagtaaagggcggggaggaagaaccccttcctttgttcccctaagtttccatggtgaacagtgaccatcctgtgcctagatagaccctagtctgcaatgtgaggacagacagagatggggtgcggagcacctgtcccggcagccagcacataccccagacaggtctgcttaggaaggaacagagagccgctcagagtccgggctattttgctgcctttggatttggcttgggctgaaaaaataggtgcctttccctggggggaggtctagaattcaatcagagctgtaactgtttattcttggcgtttcccattgattgtctgtttctaattgagcagcttttcaggggcatgtgatgggtgcacactcctctccacttggctaataagaagtgtgaagcctgagggtgctggacctccgtgggccagcggggcgttggtctgtgtggggagatgctggagcacgtggtgagcaatgggtcacagatgagaggtggaggtggggcccagctgctgatgatgagcctcctagtcatcccagtgtctgctaacccagaaaaaggccatagcgtcagtggctgtggtaggataaccctaggatccggggaagaagcagagctggagggggcagaagattcagactctgtgacgccagacccaagcctctgtctgctgtcaggatgcttgtgccttagttggttgttgaattaatatggtgtggtgtttgggaaaattgtggatggaatgctgtttatagatcctggaaaaaataatggcagccaacatgaaaatctttatttagtgaaataatataatacccagaaaaatagcaggagttcctgctgatggccatttcccgtttgagagtgcttatcttcagcacaatgatgatagcgtgcctcatcagaccactgggttctaagccttggttgatgcagcaacatcaagctcagttcctcctgctcctgtagcaccggtgcctccttgtcactttatcttttacaaagagaggctattattttgaacctctgcctcttaagtatgctcttgagacgtttggtggtgacttaaaggcacaacgacagctctcattgggagcggatagctcgggcattgttgttaattgtgcacactccgcgttctgcactacctcaaagtagtgagcagctccgccgtgttggatttgccattttaccttggtcttgtgggttttcggcccttgcctgggccaggcgggatgtgttcagggaggaagaggggaagggtgtgacttcccatgagagccacaagggaagtatcccaggtgctgaactgaggctcctctctcctccgcagcacctccagacctgtctgatcctgtggtccgggtgggttcacccaccggcttgcactctgggtcagggagctggctcatattcacagtcctggtctctgccttccctcctccttccaaagaccccctcagcttctctaagagaaacccagcatgccaagaaccacataggcagtgggagagggatggaaggatgggggctctagttctcaactcccagttgactttatgcacccccacctgagacggggttggaacacctccgactcttaatcttgcctatgaactagaggctgcatgggcttatggagctgtgtgatgcttctgaggcaccctcctttttctttgcatgcctggtaattttcagctggttactgactttgtgaattttactgtttgaggtattggacatcttggcattcctgcagatgttcttgagctttgatttttgttaaattgcttagactcagtttggtgtttttgaggctcgctttgaggctttgttaggcagggccagggaagcctttcatgtggggctaatttctctactgctgaggctataaccttctctactccatgccccatgacttatgaggcttccactctggaagttggaaatgaaaactattcctggctttatgtgacctcagagattgctctgccttctccttgtgggcagttctttccccagtgctggatagttccctcatatgaatgccctgatcagctctcagctgaagactccaggggactttctgcagatctccaggactgtctctctctacagctccctcctctccagaactctggcctgcatcctgtagccactgtggctccccagatccagaactctgtcttctcaatgcagggagaggctagagaacccagagacagtaacagagcccatgttatgggctccgccgctcttggtgattgctgtcctgtgcgttctgctgtcccatatctgcaaatcttgtttcacagatttgttttcagtgtctggagcaggagggtaaaaatgttacccatcatttcaccttggctaagcagatgttagccagtgatgctttaggaattttgaaataagggtcagaggttccccagggctcaatctctccagcttcagtgccaaagtaataatccaggacttttccttagatgaggaactggaaaacgcctttaaagtcatggtttaccatggagatgggttacaaccaaacgccaaagcccgtcccgtggtcccactctccaggcgagcccctcgcatgtttgtttcactgctggtgttccctacacttctgctgacagatgtggccgctgcttctaagagtcaggacaccctgatgatgccacatcagaagggatgtgaaagtatgaaggaaaaatactcagggatgtctgccagggaacgctggggaagatgcagttttgtttgaagtttcattttatttttcttgcttttcgtcatcctctgtttttacaagctcctgccgcagcgacagcctgtggaagggatcccccagccttagtgtggatgccaatcctgcttgcatttctgtgtcagtgtggactgtgcctccaggaacactttgtaaagccctcctgcaggtgaagcccggtcattgccaagaacactgggcaggaaagccagaagcgaggaccagaaggcagggaccaggaagcacccaatggcgtgtctcctggagtgtgatgttgtgtctatgtctgaacagagtggtccaggaggcaaattcttagacctatcagggagaataagcagtggtcttgccttcaccagtaacccactgtttcccttacctttcaattggattaacgacataaagaaataaatgagtgtaaagaaatgagacaagactacataagagggagactccagtcgcattcatggttggggtctgtacattttcttgccgggatctgactgccaaggcgtgatccacacatacatgggtgttcattgtagtttgggtttgtttgtctccagcaaaaataggtaggtgcctaggtaccggctcgccctgatttctctcttcttaagtctttttgaggtcttcgtgaaattaacatcttataatagaatatcttacattccattgctgctgggagtcttgttgctgtgattgttttgtctccctaagcccctttgaggccagacctgtaactcacagttgcttcccttctgggtcctggcacagggtggggcccaggtgctagctaccctgtgcacctgtgcaatgttattgggttgtggttcagtgttttacagagctcatcaagcatggggaatgccccactgaccatctctaaatgggtctaagctgggaagcttgcagcagttcttgtatatctgtggcaagacagcttagtaagtttttgtgaagccccttgtcctcgctgccagcctccctgggagcttctgtggggacagtgagtagccctgaccgcagcctgagtggctcagtcatcactggggccacagcccaccttaaatgttgtcagggcctggcgaaggggcacatggagccttgtgccatagttcctgaggtttgatctcaccctgcccaccttagccaggcaatccctgcccaccaggtgccccccaccacctgcataggcagacatcaaactttttagattcctcccaagacctcgatgctggagagccagacactaattcagggcctttggaggccccagcagggcacgcactggtcctcagcaccagtgcactcagccttgccagaaagaagctgcatgcatgtagaccagcaggagtcgttgctgattgccgactgttttggtaactaaaatggactacctgtgttggctttaagcagtagttgtgaaattgtgtgtcaggaagagggcttcctccacgggtctaccaagtggtctaccacttgctgagtgcagagccttgtcctggtctggatgcgacgatggaaggcttaagtgagtcatctcctgaagagactactcaggactggaagtgtgtcagcctaggggcagctgaacacccaggtggccctggagcaggctgctggagcgtctggcctgcagccggtggaagtaactgagctccaatcttgtgtccagactgcttctcccctaggctccagctgtttttctgcttctcctgtcactcatatggacagtgcactttccactgagcaggtcaatggcggggttacttttacacctaactttagctcctctctgggccctgctggtctcagcacgcacacccacccaatcctacggagacagagttctcacacctaccctccgcagggcatcttgggccatccacgtccacctgccctcccttcagcgtggccatcacggtgccctgactcagcttccagtcccccgggcttccatgttcttgtcttccctttcacttctacctttcctgcttgagtaagttaggctgtggctcgcaaacttcagtgagcatttgagtgttgtcagaaggcccccaggatggctaaatagtagaaaggacagctttactggtgacatcagtttgcaagccaggaatagatagtctctgacatggaacgaaggtgctctcgcttcgcagaaggggaagggcagttggattttatggctcgcagggtctgtgttacatagtagaatcagacatgtttagcaggtttgggggaaagctgtgcatgtttataaggggagctgagtgcatgtgcaatgggcaaacatgtacgtaacacacatctcatgtcactttagggtggggtttcagcattaaaatgaggtggaatttggctctttccatcaacaggtgaactataggacacaaagacagcctgtgcacagcctccataagttgctgaaactggcttgaggtctgcagttgcttatgagaaaggggtgtttgtaagggctgtcctctgtcccatcagagttgcagtggtctgggttataaatcagaggggtctgatagcacctattgttagggagtttagcaagagtgtggctttctttgtagcccaggaatttaggaagttaccatgccagcacataggtaactttgtttccttaaccatagggtctgtcttagttgctgaagggacatctgttttggtctcagataacacaagtcattgggaaagctgcaggcccagcccaggggagagtctgctgcagtggggctgactcagcctggggctgaggctgcctgcaccaggcccacctgcgcccagcccactggccacccacctccctcagcagcccacctcctgacccccgacgtggttggcctttcctcagtcctcatctgcatgaactctccacacttagcacatgcccttccgtcttgcagctgtgtccccaggcctcagcaatcttaaaacagcccctctgtcaccccacacagagcaccccagtcgtctccaggaccttcctttggaacaccgagccctgtcacatcttcaaatccttctggtgcattctaacatccgtctgccactgaatcttcagaacagccttaggggaagaggaaggctccattctcctggcgagagatgcagccaagccccatccagggcccgcagctgatgagcagttccatgccagaatttgaagttagcacccccaatgttctctgctttcaggattcctagtgcagagacatttggctgttggattatgaaccctgccccaatctgacctgcagcttctcctcccaccatctcattctatggattaatgtgtggaccacgctcttccaggcccatgctcacttctttcctgagtgttccaatcacaacactcaggacttgagagtgtgtctgaacctggagatcggccttaggaagtaccatccacatttaaagaagtttggaggaaaccggtgtcagattccatgcagccctgagggcgggccctggctccgaggcacttgtccccaggcagaccttgtgagtgcttgcagcttttcaggcatggaagtgaaagcatacttagctgtggagagatttggcactgggtgcctgtaggatgacagcagcacttcttggctgaggtccagggctatgtttggtacagaagaaaccatgtctgatttttcagctggaaccaagcacacccatgtggagtcactggggggtcatgggggaccccaaacatctttattccagagcagcccatctttgcagggagatctatcctacaggtctcggttgctgttgctgcctcacccttagttctaagacttggcaatggattatgaccaaggttgacactctgggccagttggaatcattcttctcttgtcttcatgcttctcctccatggtaccttctgttaatactttctgtttccaatggatagggtgcaggcttctgcgggctgaggcacgtttaagattcgggtccgggaaatgcccaaaccgtgtgtgtgccctgtggggtactttctgtaaccacctgaattccacctgtgatgcagaatgagaaacagcactgattccagcttcatttcgttgctgctcaacccccgcagaggagctcagagctactctctgttgcttttataaacgcctcccaaatccttgaaagtgagagcaattaagagtcttagtttgaagctcttgggacatcagccgcattttccagacgtcctgttttcagtgatcagtccgtccttataccctttaagtaatttctcatccctcagccccttccaccctaccaccccgctgagtctccagtgtctgttaggtagaaggttctgatgacagtctagaggcttcctggctgccacaaacagttccttcagggctggcccctcacaaatgaaggcagcccatcctttccatctctgcttccatcagaggaccacttgctcctcccacccttaggtttctgttggtggcttagcctttggtggagagagcacatcccactgctgggcagggcagtgccctccccacagttccttccaggccgcctggggtcccacgttcatccagtccttaagcgccggctgcgggccaggccccggggatgcagcctgaatgaagcagaggagaaccctggagaccacatctgccagggaggacacaacagcgaagaaaagcaagtctggaggggattctactctccgtggagaaagtaacaccaggagaggaggaaggacctgggaggagggaactgcagttttcctgtcagcgctcgggacttggcagggaaagcggccttcggggaggggcagggagggagcaggtccaggggtggcctgagctggccgagggactctaagccagggtgaccaagcaggcaggtgggaggagaggggttggggtcagaggggcagtgggaaaagggcttcaggggttcccgcaggtcactctgaggacattggcatctgctctgcatttgggtctggggtctctcttccaggccccttctctgccgagtgcccgcgaccttgtgcctgtgtccatagactcctcctgaccacgtccttgtcattcctaagcccacccccgctttgctgaggtgaactttgatagtgtaaaatgcatgtggagggagccttctagactaaaagtttcgagctctggtcatagggaacccacagggtcttgggcccctggggatgtgggcagaaggcctcagggtaactccaacccgatggttcccatgtggcttctgagggtcccacttcccccacagttcattctcacacagccatggaaccaggaaccatttacttcactattgcttaaagccaccagtggggcccattgctcttagaataaatctagactcctcactgcagtctaccctgtgggtccacccagcctcacaccctccctgcatgcctggccctgatcgttgtcccggcatgctggccttcctctgtcccttcatctgtcccttcctctgtccctctgacaggccagacccctgcccacgttggcatcagacagtcgagcagaagctctggctctctctgtcactccctgtgcctcagtttcctcatctgtgtaatgggagtaataaccttacccacctccaagggttcttaggaggattaaattggagacatagtgaagtgcacaaaacagcgcacaaagggagaagtatgtgttagaaatgattgttaacttaattgtagtttgggggccctgcacaaccccagtgtcccctgagtcacctcccatgtcactctgcagagagcaggaagaagcccccatgtcctgttgcaaaaatgcattttagtagcagcgtgttgtttttgatgctgcaatatgaatatccagtcctcttgaaaatacaatttggaatagtcttaggtttcattcgatgtgaaggaaacaatcacttagagaatgagtttccttgaactgtccagggcaaaggagcctgtttgaaataatcagcgcttttgggaaagggacaaccagtgtattgcaggcagagcctgaggtcagctgcttgagcatcagaggcagggagcaccccacacaagctctcagacctcaaggggttggccaagcctaagcctttgtgtcccagccagccctgccagggtggactgtgttatggctgcagacttatcctgcagccactggactgaggtaggacctggcaccagaaacaaaaaaaataaacccaggaggtcaaatttacacgtccataaagccttttgtatttaaaaagagatggacgtttggttgaaactctgctcttcttcatatttcttattggtaaatttgcaacacagtgcatctgttcacctgtttttaaatatgtccctttgggttaagttggggttttagttgtagcaattcttcataccctgttcttggatccagctgagggatgagctggaatggaagtgctagctttaggattgaaaaatctcaaaagaatgtagattggatctggaagctaaggaacgtgcatagaccttgaaagagagggtcaaggctgcaaagctgaccgccttgcctggaattgctcctttcaacagagctggggagggaaggaggaagtgacccaggcttccggccttctccccagtccctgaggatggcctagcccctgtggatctccctatccgttagagacgcatatggagcatgtacaggtgacattgtgtggcttctgcaatttgctggaagcagcagggaaggtcaggccgtacatgaagccaaaaggaccaaacaccagggggccgctatgactgttacaagaagtttaaaaaaaaaaaaaaaaacactgtggctgcttgtgtggcaagtgcagttataaacaatagctcagcaggcgggctgtccctcaaacaactttatttacaaaaaccagcgttagctggatcttgggccttggtttgcggcccttgagtgtgagtcctctacccacctctctgtgtttctgcttcccttctgtttgggcccggctaatccctaccactttctgagctcttagagcttatcctaggggcagccccaggatcctggcatctccctcaggtgtcagtccaggtctgtgtccccctcagctggtggctgtcacctagggctggaaacaaaactgcccaaggaagaggaaacctttgctagaccttgcctgaaacatcatgctcttaaaaaatgactgcattctcacaaaaccaaagacaccaaaggctctttagggcacctcacgctttgtacaaaatcaaaaaaaatctgtcactgccgcagctcaggaggtctccccataggtcgatggagactccagcctaatctgcttttttgtttctaatgactttttctgattataaaaataatacctggctattgctcaaaataagaaaattcagaaaagtgtaaagaagaaaattaaaatcacccataatcctaccagtaaatatgaatatatgtgtagagaaagaacgaggtgaaacgttgttagcatattgttctgtttcttttattcttttctatgtataaatttacatatattttggacaaatttgagattgcgctgtatcagtatttctgcctggcttttctcattaaattgtgagaatattctcataacatgattgcagtagcttccaagtgcctcacctgtgcaaccttttctcagcgccagggccgggggatcctgttgtgtccctgtgctgctgtagagccctccggttccccatctcaggggagatccaggacctcccaggggcccagaagcttcagcactagttgaccccatcacccccaccttatttctgcccatgtgtctgctccagccactctggccttcttgcttttcctcagacactccagccagctgctgccacagggcctttgcacatgctgttcccacctgcccatcacccttccccagatgtgatggggccagctccctcccacatctcctcaaggtcttggctcacaggtcagtttccctgtgaagcccatctgggccccctatttaacctgcagcccctcagcatatcctcctctcatactttttcctccatgtacttctcaccattcaacgtcctctatgtaatgaaatattcacttattccttgtctgggtatctgggagagcaggggttttgtctgtatttatttcacagtgctaagcagagcccctggcctgcagtaggtgcccaattccaccttcttcttccaaagcaacagccccagatggttggggggggggtctcctcccccggcccatccacccgcacacggcccttcctgactcgttccactgctcccacactggcccagattcccaaccatgctgaggctccccacaccaattccagggactcctcggtccctgttcaggagtcgacagaagctttgtgtccatcctgactcctgttcagccctcacagcctgaactcctttagacaactcttgacccctgtgcacacacatgcacacacattcaccatcctacgcctgcccacgcctctccatgaccttgaaatacttaggtcacttatgtccttttggttgaaatactttgtcactttctatggttatgtcctgtctgtaaccatagtaactgagttgtcttcccctctcagccaagcctttctctagtagcactttcattcaatttttcactgatgagttagttgcagcatgcctgttcttaagctcctttgtgaacatggaacacatcctaaagaaaagttcttgctgtgaaaaagctccacctgccacagattgcctggcagagctcacaaccagcagcaggtactcagtgagtgctgagtgaggcttggactcatgcaagatccaccaccctccccagccaggccccccaggtactctcagctgctgaccctgtgtctgaagtgtgatgtgagttacagctctgtagaggggtgagaagtgctgagcagtgtttagaatatactcaacaaacagccactgctgcatgcacatgcaaatgctagctgcattcattcaaacacctatgcatggaataggtgtttatcgagcatgtactttgcccccagcactaaacatttgaagcatctgtgaaatgagacccctgcaagaggatgaagtaggctctaatcctcagacctccaaggatcagctgtgacatcttgatctgatcactttggctttgttctcctagggttgctctgggatgtcagagagagactagagagaagggggtatagagacgggagggaaggaggaaatgcttgccacctggaggctttctaggtaatagagattagtggtgaggaggtagcaggtgagaacatgagggctgcagtgtgcagccaccacgatagtctggctgatgtcctgtaaaccacagcccaatgcaccatccctccagctacaccaggagcccatcacatgcagcatcataggcccaaggccacacaagccagggtaagttcaggtgccactcaccaaccttgggagctggttttctgtcccagagaagctgcacatagaacacaggtgagcgtacctgcagacacacagacatccagtcccagccccaggtgcctgtgggttttgagtcagctgtgagggcccctcctggtcctcagcaagaggggcaagcgtgggccaggccccgctccttgtgcatcaggttcacaccctgtgcaaacaggaggaagagggccttttatttctactggaggcaatgtctgtcatctcccctgggtgccgacagctttctgtctttgtgggtgtgacccacagtgacactgcatttgacatcttgaccgagggcataccgcatgagtgtgtgagcctagagaaatggtctgtgaagctacttccataccacatggacgcatgccaatatttattctattccgtttcttaaaaaggccggtcaggacccaatcaatggatcgtttgaaaaccactgctctaagccagagatctccaaggtagggtgcatgccactctgtgcaaagaagacatgagaaattctactcaaacttactgaaattttaacttgttagttttaatttctattttgtgtatggctattttatatatttttggtaatcaaatatattatttggtccactagataaatacaccaaaagatacacattacatatgtataatgcgagtgatcattggtacatcagaatataaatgcagaaatgcttccctgatgggggtgcactgtcagagaacaggtcagagcccacctgcctgggctgtggctgggccggccctgggagctctttgggtggagcggccatctgccttctcctgaatctgtgccagccactcctcttgctccccttgttcctcctcacccacctaagatctgcgatttctaaggcagaagcgccctgggaaattaatcactttggtcctcaggttaaaaatggccagaaatccacgtgcagcacacaccccaccggagggactcgcccaggatttaagtgtctaccggaggccatgcgggtccccacctgctgccaagggtctgaggtctcttcactgtcccaacagagagacttcccttgtggcagttcttggagaaagtggagaataagtgatgcccttcacacacttctttgcccataaactaccagtttatctccttttaggttcatcttcaggtaaaattatcacagggtccttatcccagtctgaaaacttctaatcagcggtccttctgctcacaggacacccctgctgaggggctaatcaggccgttctgctgctcctggtacttttatggacttggacacattcctagcaaatgagtgaaattttctgttttcttatttagtcctggaatcttccttctggcaggtcttaatactgaaatgacaatgtagattgccagtccaggagggacacatcacccaatatcaagaggttaaactcgaagcaggtggagcctcatttccccgtgaggactagggtgggatccagggaggaagaagggtgacataactatgacaaaggtgcaagtgggggtgcggtcggcatttctggttctgctggcgagacccatggactctgggatgaggaaggaggcattgacagccgcagggcagctggaggttctttggcagatcttggttttgagggctggcttgtggggcctcacaggggcggtcgcttcccgggctacccactatgagatgagcctggcccagggtgtgcagattcatgtgccacatcatagggcactggcagagggcggcccctgaattctctagagggtcccggcatgaatgctgctgtgggctgtgtgacagctggggtaggcgggcaggttccacaaactgatctgcagcttggccaactgcccccaagcagctagcacccagaggcggacaaggtggacgggtgccacctgcctctcatgggaccagcctgcacctgacagggacagggttttgtccagtccataagagggggctgaaatgaaaaccattcgctccgactccctcctcagatttttaaatgtcaactcttccaaaagccttgcctgtactcaggctttacgtgcaaaattaggcagccatttgtgcagtgcaggtctgcacctgcgttttaaacttcagttatccgaatagtcacctcagcttgccagcccattgggcagcccgacagcagcctgacctgtatgcttcagccattacaggacggggaccagggctagaatgcaaacaccaagaggacaggatgggaaaggcacatctgccatgtgctggagggatgcaggtcacccacaggctcggggaggggtgcgggtcacccatgggctcgggccttcactctggcagggccggcggcctcacacaggtctccagcacactcctgcagtgctctagtgttgctcagcctctgtcaaactaacttcaaggggggaatctcctccagggtagaagcctctcccatagcaggtgtgtggccacggcttgtggccgggcagggagcatcagtccagagtgctggcaccagtgttttacagatgcctagggttcgatgtccccaggaaataagagtttggcattgtccacaggcctctgaggccactacttctgtgaataaagggaagggaacagaacggccaccaacccttggtaactatagctggcatctgtcccatatgagaatttgcctgacccacttttcatgtcattttcaacctcctaaaaatatggtcttcttttttttttaattaagacagggtcttactctgtcacccaggctgaagtgcagtggcgtgacctctcaggctcaagcgatcctcccacctcagcctcctgagtagccaggaccacaggtgcatgccaccacgcccagctaattttaattttttacagagactgggtctcactatattacccaggctgatctcgaactcctggactcaagcagtcagcctgcctcggcctcccaaagtgttgagtttacaaacatgagccactgtgcctagcccaaaaaggcctgatttttaaagacccacatttgaatctctaaaatgtacccaacccattccaatagtcaagggcataggtatacctcagtgaatatattcttttttttacatcaagatgtagcaagaggggaagggcctcctcgtactctgcagtgacgaggggatggcagcagattcaatgagacatctcagaaaaggggtgagcagtagcaatggtgctgcttgttcactgtgtaacttggaacaggtcacttaacctctctgagcctcagtttccttatctgtaaaatggccacattgctgtcacctcgtggtggatataagggtctgatgggcacatgtggggatgaaggtaaagtcggcttggccaggggtggtcaccaggccccttgcttcttctttttttttttggagacggagtctcgcactgttgcccaggctgagtgcagtggcgtgatcttggctcactgcaagctcaagctccgcctcgtgggttcacgccagccgttctcctgcctcagcctccggagtagctgggactacaggcgcctgccaccacgcccggctaattttttttttcagtagagatggggtttcaccgtgttagccaggatggtcttgatctcctgaccttgtgatccgcccacctcagcctcccaaagtgctgagattacaggcgtcagccaccacgcacggccccctggcttcttactagcttagtcactggcaaagagtccctggctttggaagcctttctccttaaaggctcttggaatgttccacacacaactcttcaggatgaggggtgcctatgaggagggcgaaggaaccagtgtcaaagggaatccttccctctccaccgcccctgcttagtctcctgaagaatgacgtgttttacaactggcaagtgttgatcgaagtccagcccagcccagccatcttgcctgcccgtctcagtgaggggaagctcctgagatgtctcccaacaaaagcttcaggcaggcaaaggccattcttcatctgctcctgagtttttgaagctttaaggccagcaaccagccttggtggcctctgccgcactcagccatgagagtgggagcttcagggtaaggcgaacgccccacaggagtctctggaacatgtgagtctggtccatggagggttctcagggagggtgctgccattgggaagccgagcttgcaaacagtgttctagaagcttgctacaacaatggcatctgcaaagaacagcatcgtcgtctcttgggagctggcagaaatgcagaaacttggcaacagcccacacctattgagccggagttggcctctgtgaaggatccccaggtcgttcagtgcacactgaaatagaaactctttcagagcaggtctttgagcagagcccaggacacagtaggtgctcagtccgttttgttttccgaatggtgcatccatgaaaagagtcatgtgttgccttcttgttaaactgtgagcacttgccctcctgcttgcacccttggcttcctggatttccaccaagatgtgggtttcaggacacattccctcccttgtatcgcgctcccaagccctgtcgctcagtgctgaggttgctcttcctccactctgggtcagtgcaggggcccagggggacacaactactttgcgctgtttttcttttgaagctgggcacctcccacaccactgctcttcttttcatgttacagctgctgtcctccctcatgactggcttgccaatcttactccttttttaagaaaaaaaaaacaaagtctcctcagtcagacccagggatttggggtgactatactctggcgctgtcgtggacccagcgctgaaattccagggctggccgcacctccccaccggagtcaggagacccatggctccaggagctgcggggagagagtcttctctattcaacccagccccaccctcggacgcagccacaaggctaaagagcactctaaaccaagagtccattctgtagaactgtttaaaggatggatggaagaaactcttcagtttttcttacctttctagacagttctgtggttggaaagtggttgtggaagaaaatcacatctaacctaagaaagctggggagacaaagtgttgggaggggctttgctgagccagcaggcagccactcgaggtcacagagaccatagggtggtaagcggggtcccctgtgggatggtgagccctggcccaacctttactgtcccatggacaagactgcaccatccccttgagctaatctcccaccccatccggtttcatgttcccaagagcatcggactagggggtggcccctgcagaggggccccagaacaggggcaggctctgggaagggcacacacctgcacaggtaccaggagcagtcctcatgatgaatggataaagttaccgagatgtttaaaatattgatgttatcattttgtttccattttgtatggaagttgaaaatgtgttctctttccattaaaaaacatgaaaagtttagttattgggtgcattggttatgtgtgtgcacatctatgtaggagggggacgtccacctgataaacaaggtgacgccacatgcagatagagccactggagtcctttcctttccagatggcaccttggtgggaagggctgcaccctcaggccgaatccacaccacatgggagggcagagccacctggcttccctgcagcatggaggcctgtgcgcgagacgagtctgcaccaacttgcagagtgaggagctgggaaagtgtggctgctcctaatgggtgcacgggagccgccgtcccgcacaggcactggcaggcgagggcatcctgtgaccgtgggcccacaaggatgtgtgtggccggtgagggtccttctgattgggatggcaccggtgccaaattcaggcccagctttatgacgtgactaattggagcttgttgtgaagacaatgaaaacttccccagatggagagttttgccccaggatcaagtcacagatctgtagcagtgcctgggactccgcaggcaggccagtgcgtgcgctactcgcatgcctgtgtgagtatggcaagcctggtccccagtggtgggtggaaaatgactcctcagtcccatgtgtgtagagatgcatctgcctgttgaggcccttcgggttagtccactctgggctttcagaacgaagactgacagggcaggaggaaaggggtccatggagaagccccttggctcagaagcagagatgagtcaacaggatacagcctaacccctcctcttcctgggagacccctcggcagcggttcgcctgcctggctgctgcagggatgctggggatgctgaagctttggatgaggcattgaggactttcttctttgaggcaggagctcttacttctcctgccgtctgttgaagctgcctatcttggtggaagctttttgccttcactttcagcaccggccttcggctggggttgctaaggcatgagggatgcatgctgtctccccaccctcactctctgtctccgccgtgaaggcacagtgcagtcacttgtgagcagcctctcggggacacgtgctggtggccgcccagtgctcagtgacctgtggcactgctgaggggccaggcactgtgcttctggctgctgtgtctcctgatgagaatagggagcctggaaatccatgctgacattcagatcagggccccatctcttctggacttgcatacaacaacctgttggtgcctggatttcctgattttgaaaacagttttcagtaccaactcaaaagggtcacaggaggactaagtgaaacactccaggcctgttcctttggggagaagggaatcatttgagcccagcctcagcattattgctgccatgattgctgtgtaatgatgtcccaagtgcaggcgcgtggcaggtgtgtttagaacgtgctccgatgccagtgagtgagacgaatggaggactgcgctcactgtgccctgctgctgtgtcttcctctataccctgtcaagtgggcagagaacactggggtccagaaagctggctcccaggtatttggagagccccacggagggctgtgggagggaacaggcactggtttgttctctgagtagcacttaggaggaagcaaatgaatacagccataaaatagagcaaaacagctgagcctggttggaggaaacatttcaaaggaaataaccctagatttagatcacacatgttggagcccggagtgaggtttttcataacctccctctgaaaggcagatattcgtagtggaaatgctgacagccatgtgcctgggccgggtctgaaggcagctggaacctgcagccaccctgctcctgtgatctgctcggcctgcacggagcagccctgtgatggggccaccctttatcatgccacttaaactcagcagggcttctgggttttttgtttttgtttttttaactcatcaaggtgctaccagctgcaaatgctagttctgaatctgggtgagacctggtgtttcccttcactgattgacagcattgaggggaatctcctagaccaggctgacgtcagacttgactcctggtaggtgtgggggacaggcccctcctggcacctgcgggcctcacatgcaagggcttagcctatatccttagcctatgccaagcttacacccatggctggccacagagcgggcgtgactctgccccaggtagcctgcacttccatagcggctcacatggtccttcacttgcctgctgtggttcccaccttcgtggatctcactgactcactgcctctctcctcttcctttctgaatcctgtacgtccttcctgaccactgctgagtcccgtttttcccatgaaggcttcagaatgccccccggtggcctacctgcagttttcggaaagccctttggccactggcctaggtgcctctgtggtgccctacagcacagagcccagttgtgctgctgcagagaccctgtaggccccaaacccaaaacagtaccctggcagacagaatgtgccaggcctgcacacaaccactccaccctgctcagtttccgcttggtgaggagaaaactcagagacagctcccgcttcctcctgccctgagctctgtgctcctccagggagatctgcccagagggcagctggcatttactcagtttttttctgctacttctggaaaggtgagggagaaagagtggaaactcacaggcatttacccagcctgatggcatttgcctaacccagcttgtagcaatcatcccatgatgattctagtatcatagtttcttcccagccacctctgtgtacacaataaagagttccctctgctttattctttcaaatcactgtgagctccccatataggtgtgcacttaggctgagccaagtacagcctaagaaggaaggggctccattgggcacccaagtgggaaacttcctccaggtataggatcaggggacactgtcactcacagatggtgaactgacctaactgaggccctgaggaccagcccagggagccttttctcacagctggtacctccccaggctgtgtaattcacggaccttcccccagtgggtgtgcctgggctgcccctcccagcccctccaggtgatgccgcagccctgagaggaaggatgtggcttagccggccaggagggtttattccccggttgctcatggacttgaaccttcatgccacctttcctgataaccaccacccaggatcagactttcgtcaaactcttcactgcgcacaacgcctgctatcttgtagaacaatgggagatgtgggaaggagtcgtgtcctgagacctcgccaaatcactcaagatgacagattattgacacctcctggggtatgctcaggccagcttctggggcttgacagcctgagtggaggcggttactgaaaagagcttctgtggtttatgctgaccagagcagactcccctgccacagccggtcaccagccattagaaagtgcattccagtcacatgctttgaaatctcctccggggacctgcagtgctcagggcaggctgggaacctgctgtcatggagcatgcagggccagcccacgtcttctgatatggggcttccttcccatcttgtccctagtccctcactgtctgcaaggcggcaccgtgcatcccagaaatggccagcagttgaaaagattggggcgacaaggtagtggcccttggaaaactcttctttctctatgagtcccctctctccatcatggctcctggggtttttgagctgctccaaaaaccttttcaataaaacctatgccaccccaccagcctcttctgtgttttccctgcagtctgacggatttgaatgcattgccagtttgtgaatggaaatgtggcctggagagtgcagagggctggtgtggcatgtgaccatgatttaatgcagcctcccctctcccctttctcactcagctcaatgactccgccaagcagctcattgagatggacaagccatgcccagccgctgcatccagctgcaatgcctccctgccctctgactccggcgctgtggccagcgtggccccaagtcccactttaagcagctcaggggcggtcagtgcctttcagcggcgtgtggatggcaagaagaacaccaagaaacgccactccttcaccgcgctcagtgtgacgcacagatcctcccaggctgccagccacaggcattccatggaaattagtgctccagtgttgatcagctccagcgatccccgagccgcggccaggattggagaccttgctcatctgtcgtgcgctgctcccacccaggtaacatcccgcgggccagggcaggcatccctgggttctctggggttctatcctcagctccgtgttcagtgtcccccgttcctcaactagcatggaggccgccccagaactgccttttggggttgagtggggtttgccctttgctgcctggcactggggcccccctagaagcgtggagaatggtgagtgtgccctccctggttcagaagatggcctcgtggtgtgtgagctgattttcagtggtccagggaatgtctgagtaacacccacccgcctcatgacaagcttttccccgtgtcagtcggcttccagatgtctgattatgtcctggaagagtcttggcttagtgctagcatatttttaccatctctgcaatgtttgctaatttccctttcaagagaaagaaggagtcagagctcagaatcagaatcaactacattgttgagtactttcgttactgttgtttctacagataccttctatttctagactccatttccactagttttttttttttgtaaattgaagtaaccaaagcaaagtatttaaaggctgggcacagtggctcatgcctgtaatcctggggctttgggaggccgaggcgggaggattgcttgaggccaagagttcaagatcagcttgggcaagaccctgtctctacaagcaaccaatcagtcaatcaataaaataaaataaaatgattaaaaaaatttttaaataatgaacaatatttagtaagtacttgcctgtagctctgacaagacccctcacagtggcatgcacagggcaggagttgggcaagtttcccctttatgaatgcagagactgcagcaggagatggaaggggctttcccagtgcccggcagggtgaccctgcagccacactcctgtgccattgttgtctgaccttctgcaggactgtggcagatgtccatgggtgagcccaaggtgcccacacaatggtgcccactccatttctccctgcgctgcagccttccacccagcggcccacccgccaccacgctccacattccttccagagtccctctggctgccctggacaggcctcagagcaagggcgctgatctgcggggaatcatggggcagacaccaataagcaactggctgggaagaactgtcttattcaaaatcacaatgaactcagacaactttacacacagaattgtcttaaaaattgctgagcttctggagaagggccatgtaatctagatgtgccacatcagcctagaaatgccccctacacacacttgcacacatgcacgcacacacacacatattacatggacacttgagcacatgcccgcccgcacatatgcactcccacgcacatgtgcactcatacacatggcacacacatatacctgcacacccacacatgtgcacttacatacaccgccatccacatgcacacctacacatatacacatgcacgcacatatacacatatacacctgtgcacatatgtgcacttatatgcaccccttccacatgcacacacatacacatgtgcacacacatgcgtacaggtgcatttacacatacacccctccaggtgcacacctgcagatacacatgcacacacacgtacgtatacacatacacacctgtgcgcacacacacacacacttgtgaacttatatgcgtcccttccacatacacacccacacatacacccgtgcacacatgtagacatttatacatgcgcacacacacattggtggatacacacctgcacgcatatgtgtgcacacacacaaacgctggctctcatcggcggctgaggctgaggtctggaatgggtgctgtagtgtctggagctgtaaccgtgcagtcatctgcccccatggttaccccactgcctggatgctcccacagcctgtgcctgggagccatattccccagagaacagccattggggctgctagtgcattttctgtaaggggaaaagcataaccttggtcccaaccctaactccactcctgacctgggctaaattcttcttgagcacctcctatttggaaattcctgggaggggcatggtgacccagtggcggaccagtgtggctgtgctccctgtgtgtgtgcacatctggggggtaaagccacaagcagtggctcttggaatagtcttgcttattcttgctcaaacatccttgacaccgggcaggttgtcatggtggtgctaagactggggggagctcaccctgtttgtcaccaatgacaaagtgtgataactttggcccagagctggggtccctccttggcaacctgagcaactgttggcgatgtgaacagtcgaaagttgtgttgtgaaacaaatttggctcaaagggaagttgcagcaggtttgaggggtacccctaagaagaggactgaggagcagcggcctggcccttgtggaccacttgggtaggtcgtttgtctccttcctcctagaagagcaaaggccactctcactgtagtcagggacccccatcaaccagagggagggcccttcttcctgatcaccagccagagatggccctggaactgccaggccagtgcctatcctgacaagtatctggcctgtgtcctgtaatttgtgagtaatatgtccaaagctgccctcggtgttccttggagttctaaaaaaggagcccacagggcccatgactttgcaaagctgctgctgtgtcccaagagggccaggggcatcttctctgccactttcccacaggcccctgagatgtgggctcagcacacacaggtacaggatccggtttcctctccttcctgcatcctcacctgcaccagcctctcatgttgccatggcctccgtgttaaaacaagcagagggaacctttctaagctctctgcagtctgatgtctattggggctggaagggaacagatgtttctattaatttgcatactacctggctccacagggattagaattagggattgacgggactgggatcctgggatccattttccagcagttcgacttgaagcgaaagtcatggccaggctactgactttagtttgggtcacctcaaagggcaagaggtcaaataaagcagttgccgcctgtctccctgtcctgatttaatcgagctgccgggagacagaaggggcacctggtgcaggtgtgagctgtgtatgctgcccctgcgggctccagtgtgctgctatggtctggatgtgcccagagaccaagccctcccggtctgcccctgctctgcactgccttcctggttcctaccaccttgctggccatgtgcgtctgaccaggaagtgcctggcctgaggactggcccatggcagccaaggcgagccagactcaggtcctgctgtgaccacagtgctgcagggattctcttccccaccatgctggccacagcccaggagagggagcccaggcccaggattctgtggtcagtgggtggcacttcggctttgatcatcggcttggagaaattcagcattgctgtgtcatgggctcatccacaaacagaggcccctcacatgccagcactgccatcgtgggaaacgtggagtggacagagcaggaaggcccgcagccccaggctcctcggtgcctacagcatggggcagtgctggccccagcaagggccactgcagcagccagtcccctgcctctcacagtcccctcgggacccagtgtgtccattcaggctgtgataaagaacatcttgactgacaggatgaattcttggcacctggagactggggctgtaggggaagacaggatggtgaagtgtacaaggctggtcatctggaccaggacttctgggccatggggggcagaggattacagatcgtgggttgtgtgtcccagtgcatttacttttggggtgagcatggtatcgtccctggtagttattgaatcctcattgaacgttgcactgggttctgtagaaaggtccaaacagcaggcgtctgccctggaaaagcagctggctggagtggagatgggctgcttgctgggcactgtgctgtccaacgcatcgactgcagttgatacacagtcagggtgggtggggggatgtggatgaggaagccccttagctggccgaattaaggggctctcgctgtaatggactggttttgctctttctttggtgttgtcttaaaatagaaaggaagcgtgcgtctgtggtttctatagaaatgcgtctgaggcacaggggacacttccctgcttctcagagtgcccgagcaccatgaagcctgggagcacagcctgagagccgcgcactgtccgaggctggcctcctccccgcagctgttaggggtgcgtctgtagtttgcctgtcccccatctctccttcggcttcttctgctgatctcacctcctctgtcctggcttgcatcacttctcagcttccccgactgtgtggcccacctcaccccacagtgagccaattgttcattgtttccacttcagagatgaggaagccgaggccccaggggtagtggtgacacctcagggctgtacttctgtgccagccctccctggccttccagggccccactcttgtcaggacatggttatcacttaactttccagtttactccataaaatgcacagggctgacctcaggccaaaggagacacgcaggagaatgccagcaggtccctgcggtgctccataaagtgcccctgctttgcttttcttttaggctgaggccaggctcaatgcagggtgctggggtggaggtgcaggctccctctctctagctgtgtcaccccaggagagttgctgaacctcttggagccctgcagttaagagccagcctccagagccagacggccaggttgagcacttatccttgcacctgcaaccttgggtaagctgcctgacctcttcccaaaaactcccctacctgtctgtggaatggagccaagctgtgcgcccccaccatggccactgtgagggtggagtgagggcgtgcgtgcgggctgccctccttggtaggtgtaccttgagtgttggctgtggtggctctttctgctgctcagggaatcagggaatgaatcaccagtccaagacaccaggcaccagacacatcatctctagtcactgctttctgctccaggagcccatctctggcttggtgctgtgctgggtcctggaggttttggaaagctggtggtgggtaagaagtgggtgtggccgagaccactgcaggatgggaaggaggggaagtaaaggaaggagaagaaaaagtgtcagagactgacacccacacagcctgaaatatccactgtcaagctctttgcaggaaagggctttaggctgaggctttgttgatgagaatgctgaaaaggaagagctgtgaaaccgaggagagagctgggagctgtgtaaggtgagctcgaggcctggcggggagtggggtgccgatgcagaacaggccagcgcctggcctctgagtagccatgtgggaaatgctacaagttcgagactgggagtctcagcagccactctgcaggggcagggacaggggacagaaagatgggggagtggggcctagacggaagttttgccgggcctaggctggccacaagcacagtcaaggtcgccaaggagctgctggggctggccactgggcacctcccagaggctgccacgggcacacagggcctgggcaggtggggtgtggcccaggctggcggccaagcagagctgacccctctcccaccgggtgccccctcccagcacctttgcggaaggcccattctcattcttctctcattgacctactgcttcctctttcccatggatgtgctcgactctctgcagtccgatcttgcccaccacccctgctgctgaagctgacccagccacagttaccaatgccctgtccagcatcctccttcctcatccgccatcttgacctcttggcagcacttgacgctgtggacagcaccccttcctgaacctgtcccctttgatctgtgcctcttctttccagtggagccccgtcctggcccctcctgccagaccctctttctaacccctatgtctacacaaataccccccaccttctcttcccctacatctctagcccctacatctacacaaataccccccaccttctcttcccatcctgggcatactcacccatgggggttcaccctctccagaaccccagccaacgtcacctgccagcacctcttttaaactacagattctcttctccaactacctgctggcttcctggagagacgcctcaacttcagcgcatgccaggagcaaccgatgacacccctctttccgcaaacctgcttccccttctgtattccatctgttcctcaaggagtcaccactgtccttaggtgccctgagctaacactcttcgtcttcgctaatacccttcgtcttccccaacactgactccctgcccctgagttccctcctgagtcccttggaaggttctggggagccttcagactggcccttggttgcctctccagctcccggcagcactgtccattcccgtgagcctgtgcagatcttctccctgcgcaccacgctgctctggccctggtccatttctccccgaaactgccgtagctaatcccttcccacctgcccatgtcccttttgctgcccctcagcatggcattctacctaccaggcaacacacagacacatacctgtgcagaaggctcctgcccgcccttccagaccatctgacatgttcacctctccgcagctttctatggccccatgtcacctttccaccaccaaatcaattcccccactgtctctttgcctacaggacttccagtgtgcccatgatggaatattatttgtgtgtatggccatccccccttcctccctgggcttttaggtccttgaaggcagggctaggtgccactggcccacaggtggggctctcacacgctagcttccttgttgggtgggccacaagacagcaccggcagcattcctcactggatggtcttgtacataaagcagcatggtacctgagagactgtgtggccttccccaactcccgcaggcccggctgcacatcgatggctggggagaggacacagctgcggggctctggctgaaggtgtccagggcgtgcagccggctgagcctcagatggcccgtcctgctcatgtttgcacccctagggattcttcctctgcgactgggagaggtcagaggctcagctggtgctctgggcataatggagtatcattcacatgtcagtgctctgctgggggagggaggttaatcagaggagagggaaagaggccattcaggccaactccactatgacacatttgcttttgaggttactggatcaaatcgggaaatgattgcttacattttagaaaaatttcctcataaaccaagtatgaagtcaagcaggtgcccgaggaccctaaatgggcagtcagctctggagtgcccaggtccatcactgagagcagctatatcacgtaataagcagcccacgttctcggaggcaccaagctgtgaatgcttgcttctcactcatactatgagtcaccggtagaagagggcttggctctaccatcctcacctgggacaccaacaaacaccaggctgagtctagccactacttgttttggtaaatgaaagctttgctggaacagggtcacacacgcccatttgtatatcatccgcagctgtttttaggccataacagagatattgaggcgttctgacagagattttaagacccacacagcctgaaatgtttattactgagcccattacagaaaatgccttctgactcctggtgtagaatgtctccaggaccatagcaggggcagaaatgaagcaaccagtgcagaggctacatggaagcctctgctcatgcgcatttcagtggtcgaagccaatcttacagccccgccctgttgaggggtgggcacatggagtccagcggggccttgaggagaaccgtccccaggtgccacttccctgcaactcagcaagtttgcatttctgagcacagaagttgggaagcttcaaaggaagagacgacacctttccaaagtaaggctagtgtggctctgacggctatgcttgcactgctgtgtgcaagcatatacccactaatactgcccatgagtgtcctgcctctgggcaggggctcttgctgggtccagagtgtggtcagatgcaggctgactcgccgtccagccaggaccagcaccttcattggcccttgccagcttctctgttctggagagcaccatggcttacaaattacctccaaataagcaacccttggaaattaggaacataccctttaaaatcaatggaaggggaagtgtttgaaattcagcagggagaacatcaaaagacagcatttctcaagtctcttcgtgtctgagaagtaaatgaggagagttccttatggaagcttctgggcaactttaaaatgcatcaccacctgctatttgtctctatgcagcttcctgtgttggctgggtcttattatctctgccacaggacagacagacagatgcttcaagcaggaggaagtgctggggaaaagctgaaggagctgaagcaggaccttcctgcctcaggcctggcagcccccagacttactgcttataagctgtgcaaactccggctccagctccagctctcaactgcagagtacaagctgcctgcatagcagagcacctgggcttatttttagcattttcagaaagttataaatttaattacatgccttatagggaggcaaaacaaagtaccaagtgagcctgggatgaataaaaaaaaaattgcattgtgagaatcttatacaagaaaactttcttctacaaatctggaaatagctgtacctccatgacttaccaatcctggcctttaagtggggacagaggacaccgtggctgcctgtgacctggcgtcctgatgatttttgtcgattgcaaagcttaccaatcacagtgcagggtgctggcagtgtttcttttgctgctatgacgagctaggaaccagatccacgggtttctgcctgtgcctccaggccatccttgggcagagtcaggaaagatccttgggtcttcttggcatttggagagcatccgggagctctgggtgggcacttgctggctagcagcacagaagagtcactcccttgtcctagcagctgttgaagccacatcctgcagggatccacagagggttgttcatgaatgcccaccggtaggccccatgggacccaccaggagactagcacacagtccatgcctcagagggtggaaaggaggaagggcctcgatcagtacaggtaaagcaggaggaaaccaggccactgaggtcggtgtcctcagggctgtaatgtgaagacccatgatggccctggacgggaggactgtgaggagctaagaaccttctccacccagatctcctgactgcctcaccctccctctgccagagctcatctgccctcccgctccaggctaaaccacctacctccccacaggcattatctggatgcagtgtgggtttgggaggcgagaaaaacggggtcccacacgcgctcacgcccaggccgggttcgctctcaggacctcgtcctcccattcgctgtcccctctaccagcccgtgagcttcgctgcggcaagagagtgctttccctctctgtacaggcaatgccccgcactggcactctcagacagaaggatggatagacggacacactgaattagagctgaacaaaaggatttttcaaagtccacccctcctgcagccaccgcctgtaaaggaggcactttctgtttgaagacagaatggatgcacagttggatgtggatgaatattgtgccttttatgcaaagctggatggagaagcctctggcctgatgggtgcgcacagggaggggggtccagggccttcctaccatcagaggcaacaggcgagtgagagctgtgaggaaggccatgagcggaggccatccacggctcttcctgatagaagaaaggctccagggcaagataggttgcttcttagctgaggcttgggaagccccgggtaggcgagaaaggggtcctataacttccttaacagacctcccctttccttgttgacgttttgagattttcattcaccaaactggagtcgggttgtggatgttctcctcccatattccactgttttgatccattcgccttagtaatattgtgggaattccttgttaagcttttgatcacaactttcactttttggttccagttattggcccagtaagacaaaggcagaaaggggaagaggttcatcttctcatcatagacacctagagcaggggcagcaaacgttctaaaggaagcagccagatagtaaataatctagactttgcagccaggtagtatctgccgcagtgactcagctccaccctgcagtatcagagcagctggagacagcagtggatggtgggcatggctggctgccaataaaactttattcacaaaagcagaacactgggccagatccaacctgtgggtgagaattaaatatccagcagcaaatttggaactcctacgggggcaggtggcttgtgggcagcagtggaggggagttttggcctccatcttcagtggtgagcaagcagttcccctcaccagctgagagtgctgaagttatgtgggcagaaggcgtggctgctgcctctcccaggacagactccctcactggggctccccggccactgccctccccgagagggagatcgagaggcacgcggggcctctggctacacaagctgcttgctcctctttgcagaatcaagcagaagaatcagccataaatgttttattctagagttttctttgggaagcaagttcatgagggtctgatttacaccccgtgtaatggagtggtagcgagtgatgaataatgcatgcccatttcactgctccttggggtgatgacagtgttttctggacttacattaaacatttaaatgaggagatgtttcttcttggggtcttcatctgttccatagtgtcaaagaaagagactcggagcccccgtacagcctgccaacgcccagaccctcttttttcccttttagtaatcccagcagggaactaatacggcctggttcccagccactgcttaggggccccattaaaatgcagcggaggaggctctagtgtctggttacaacctggcggtttagaatcggggaaccgcggccacagcactgcagccattgctgacaccaggcttccaaccaggggaggctggaatttgatgaaacacatcgccgtcacagatgacagcccaatctttactgactagcagctccagcgctgtgtgccattcacctgtgagctctgtgacagggagagagatgcaggagcaatggagcttgcctggatccagggcactgcacagtcagactgagctccagccctgacctcggtgcggagggcccctgcagctccgtgcacccagggggcagcatcagcgtgcacgctgtcactttactgtttgcttgtgctaagttccatcagacaggccatcctctcctacctgtagccctgccagccgaccttgcactactgggctcatgtgaaatgctcacaggctgtgttgttgagcatcctgcccgagggagggattgctggagttgttctgtagggtcagtgactcagagaactgggccactgcatgtcagccagctccttcggaacatgtgtgtccacttgcctaggccaaatcctggcaggtatccattatggagccttttaaaaagaccgtggtgcaaacgtactttattatagtcagagccctttcctgggcatgggctgctaggcgcgacttcgtgggagacagggctgcacttggctttgaagtcggagcagagatttccattggatgatcttggagataggatgaacatctgtctgagggctgtgtccccagttatttttactcaaaggcacctggagctctttctcttttcttgttttatcactggctgactccctcactcctgccaagtctttactaatcccttaaggcctagaatcatttaaaattaagccattaaaaatcaaagcagcatcagagaggtggctcgtggttaggaggaagccaggcctgcgtccagggccaagcaccatggttggagctggaggcaaggagccctcaagtccctggtgtcacagtcagcaactctcaacctcgttatgaatacttcaggggagaggcgccattggttgggggctgaaagtacatccaggcagtgcgcagctcaggctttgcaggatgctggccgtgtggaagtctgtgcctttactcaggagttcccaattacagtcatttaaaggagaggcccctttccctgcagttagttcctgccagggttagcagtggctgctcatctctgcccctcagcaggcctcgtgttcttgggagtcacattctgtacagctgggcctgtggcccccagtagcgtgctgctgagcctgtcagtgggaggacccctgaccccctcccaccttggccaccagcaaattgctgctcgtttgcatccgtagcaacagagaccagattcagaggatggactgaccccatcagcatcgggaagccacgaccagtgtgccactcatttctttgtacttttagttttcatatccctgagggcagagcccagcccagcgttgcctcctacacagcaggatgtccctcgcacccctcgccctgggtaccacaccacacacccatgctaggaaggccggccacacgggagccacgctcagccatgtcagttttaggcattcttcatcttgacctttgggaaaaagcatttccacacatctgacctctctctgctcttcattccagctctaagtaatagcttactgttaaatcccacatatttgcttggagcttttgccatatcaagtgtcagctgaaggccaggattccagtgaagccggcagaatgtctccctcctgctgtctttagggacagcctgtgtcagggtggccaaggccccagacccctgaatgggccctgtggcagctcccactgtccacacctcaggttccttggctgagccctcccgagcctcctgacaccgagccctgtgggttgctttacgttggactcacgcagggcagtcggtggatgccggcacagatgggatggtgagccttcggccgccgtggtccacgatgcgtgtgctccgcacagtgtgcactctcagcctagccttcagcctctgcccagcagacaaaacacagtctccttggtctctcctggccaaacacattgcccccctttcattggagtatggcttgagcagctccaggacattgggaggtggagatccaagtgccggggcaggcttcaggcaggccaccctcccagtgtggccccagcgtggctctggctgtgctttgcttgtgctatgctggtttgggacagcttggctgtttctggagcatttatctgaacaggacagcaggcatggtaacaacagcaggaccagtgcgtgcctatcatcttaggttcccactcttcccgctgctgcagagcagagtgccagtgcctgggagcacagaactgccagcccagcccctgctggtgctgcagggtcacccctgccctttgtcagctcccaggatcccctgacaaagatggcacatgggggatcgagaaagatacgggcttaccgtcagccagacctcaagtgttaactctgttattcttctcataccactgtggaaatgtttcaggaaaccattgtcacttgatattaaagtgtagattaaaaaataataaaattatcccaaaaggcaactccccaaaggagcaaagttatggtttggtatgtaagtttcctgacttcttgccatgaaaatacacgtatcactgtcagaaattagataagccttcatatgcaatgctgtcacctccatttccactctgcataccctacatggccctccaggcctgtccatggagaccacggcacaggcggcagtggggcattctgtgtccttgtcagcctgccagccccacaccctggaacttcaggagtgcaggtttttcgtatcataaacagtgctgctgcgaaatccttacctgtacctcctttctgacttgtctgattatcattattttatatatatattttttgagatagagtcttgctctgtcgcccaggctggagtgcagtggcgtgatctcagctcactgcaacctccgcctcatgggttcaaacgattctcctgcctgagcctcccaagtaactgggattacaggtgcttgccacaatgcccagctaatttttgtattttagtagagacagggtttcaccatgttggccaggctggtctcgaactcctgacctcaggtgatctgcttgccttggcctcccaaagttctgggattacaggcgtgagccaccaccccaggcctgtctggttattttaggattcattcttaacaggaaactgccggggctacaggctttttttcctgccctgtctctgtctgtctgtctctttctatctctgtctgtctacctctgtctctctctgtgtctctgtgtcttcctgtctgtctctcccgctctagaatggagaacagctttgtctacaagcccaaatcaccaggacctggggctgtatgagaacgtctctggcccccacattcccctccctattctgtgctctggggcagcacgcctgcccccaccagccctccacacagcatagacatgtcatgagggccatgccttgtaggacctgagtttgcagacttctctgttactaactatggcagaatgggacagaaaccaggggactgtgggtccactggcccaagccaggagtgagggctttccctgcagggagcacactggggtcttccgcatcccatgagtgggatcaagaggtgtaactccccaccagtggtccagcaggggcagtcacctgccccaggaagcgcctgtgcatgtcagcattcccaagaccagtgggtccttctaggtccttggcttccttggccattccacagcatgcagctcaatggacaatgacattccctctgaagcaccatctcccctgggctatgggtctccttctgtttattgggctgccccatcttggcctccttcagggccctcttctgggtggtgtcccgcagatggggccagggcatgctccctcctcactgtctcccaggccactgcaccgtctaccctgttggcttcaggacaacgatcacgagcctttgttgagggcctattctgtgtacttagagtgactgctttatagcctgtgggttgtctgacttcatactccagctgtctagaccatgcaagctgccacaaccccatcttctcatgtcttggggactctgtcctccactgcttgatttctatagtcttgggagctattgattcaggtttcatctggtttttcagttttttcaggcaggagggtaaacctggcccctgttaccatcatggtcagagcagaagttcatgaccctcaatggacacgaggagcaatcagaggctcacagacgccatcttggctacggtcacaaacacaggtcacacacctgggagctaagggctttgccacaagactgcattgcctcatagatcagctatacatacatgaccccagatctgctgcccaggccagtcccttctgagctcctgattggcattaccagcaccctcatcatccacactgagacatctccaggcacaccaaacactgcgtgtccagcactgagcccatggcctctgtggtctcttgttcctgtctctccagcagcatttccatctggccaaggctagaaactcggcccatgctcctccctcaacgtccttcagacctaatcttgttggtggagaagggactgatggcccccacacatgtccaagtgctgatcccagaacctgagaatgtgtcacctcatgtggcaaacgggaaaagaccctgagatggagatgctcctggatcacctgggccaccgcagccacaaaggccctcccgagagggaagcagaggccagagtcagggaaggggatggcgtggtggaagcagaggctagagagaggaagacgtggcactgcttgccttaaagtggaggggaccaaggaacgtgggcagcctctagaagctgcaaaggcagggaattggagtctcctccagactcccagagggaacacagccctgccacaccttgattttagaacttctgacttcaacaccttctgagtgattgtaagcccctgagtctgtggctgtttgtttcagcagctgtgaggaactaacaccacggtgtggtggctaagcacgtggcctgagttcaaaataataagcaggctgcctgagttcaaaatacccatctgcaggcttgcgaaggttgaaagcattgttccagggggagtgctcagagctgggcccagccatggtagactctgcacagggcgagtgctaccatcacgggtgctacagtcgcggctgctattcctactaacagccccctgagcgtgtccagaccccctcctgactcccttgccctctgccggtgcaggctgggctccctcgcacttcctgatgggttccctgcaaagctgcaggtcctggctgtggctgccttctccctgcctgtcctccagggacgccgtgccctcagactgaagaccagaacactctcaggaggccccacgcagcctgtcctcatcccgtggggatactgccccctttgcctccaaaccgtcacttcatctggcctcccaccttagccagcctgggctcctctaggcccaccacccaccctcaccacctccctgctgtggcttgaatgtcccctctgaaattcatgttgaaatttaatcccccaggcgcagcactgagaggtggggcctttaaaaggcaattaggtcacaagggcaaggctgaataatcactcatggattcctggattcatgggagcagggctggtggctttctaagaagcagcagcaggacctgagccagcatgctcagccccctcgtcatgtgatgctctgcagagtccccaccagcaagaaggctgtcaccagaagtggccatgcagcatcgcacttctcagtctccagaactataagaaataaattcctttttgttataaattacccagttttaggtattctgtcgtaagcaacactaaacagactaagacattccctaacaagactgcctcatgcctttcgaagccctcccagccacgcccagcccaggttgggtacctgtgtaaggggcctgtgcacgctgaacttcctagggctgctgcatgcttagaattacatgtccaggctgggtgcagtggctcatgcctgtaatcccagcactttgggaggctgaggagggcagatcacctgaggtcaggagttcaagactagcctggccaacatggcgaaacccccccgtttctactaaaaatacaaaatatctcggctcactgcaacttccgcctcctgggttcaagcaattttcctgcctcagcctccccagtagctgggattacaggcgtgcgccatcatgcctggctaatttttgtatttttagtagagacggggtttcaccatattgaccaggctggtctcaaactcctgaccacatgatctgcccgcctcagcctcccaaaatgctgggattacaggtgtgagccactgcactggatattgtgccactgtactccagcctgggtgacagagcaagactctgtctcaatacaacaacaacaacgaacaaaatattagccgggggtggtattgtgcaactgtaatcccggctactcaggaggctaagtcgggagaatcgcctgagcccagaagcagaggttgcagtgagctgagatcgcgccactgcattccagcctgggcgacagagtgagacttcatctcaaaaaaaaaaaaaaaaaaaagaattgtatgtccagtgcttggccacctggattgcaagccccacacagtcacaggccatggtgttccccatgggggcccagggccagttccgactgccaggtcatcgagtgtcagtgtgtcgagcctgttgtccctgtgttggaattgcttggtaactatttgaatgggtgagtgaatgaccctaagatcctgcccacacatttcttcagtggccacaaggagacctgtggacagtggagaaagcatcctctgcgcagatgcctggggctgggagggcctggtggagagtgaggtgacagcttctccttctccctcccttggggtgtctctgccctcgtacttgccctccagcccccacctacacctccatggatggtgactcatgatccagaccggctctggggagttctctagaaggaaagtgatcctggcattgttggggacacctcctcttccctgtctcccttcatggagagggcaggtgtcccgggcagacagaagaccctggaatccatccgtgggaaggaatgcccccttccagccctgttctcacacggtgctcagcctttcctgcttccgcatgtggcatgaggcaggcacaggaccctccacaggaccctcagccaggcacaggaccccgacagcctctggacacctggctctctcaggatcctttgaaaatcaaaggtttttctcacagtgtctgcattgcaatggaagtcatttgagacttggagttaccctagagacaccaagggagtctctcggttgcacccgctcattctgccaggcgcactgggtttaaacaggaggaagaaatcgtttctgactttgtagacactgcccatgtagcatggtttcaggctctgctatgattgctggtcagggagggctgtaaccactcagggaggggcaggtaggtggccggcggcatgcagaggttatcagctaagcaaggccagaactggtcagtgagtaatgagaaagctaagcttcttgctcctaagctaagaaggtggtgtgaggccagtctgggggcagggctggccacctacctggggcaacttccaggtggctctccctcccatctgtgtggtctctgcttgtagtgcctttcgctcacctgaggacacacactggggacacaggcaccttccccattcagagccaggcagcctctgcaccccaccaaacctgcctttggccgaggtacctgcagcctggccccgtcctgtgctccagtttctgctgggacccctattctgcccctcgtcaggcctacacgggatcctagaggaagggaggagacccctgtctccctccttgaagggaggtggaccccttcctcctccaggctccctgacagcccctctaatggagtgtcctgaggcttccagagcagtaccacaaactaggtggctaaaagcaacagaaagctgttctctcacagctctagaggtcggaagccccaagtcaaggtgtggacaggtttggttcctcctgaggctgaggggagtctgttccggggctccctcctggctttggtggctgccggcatcctcagcacccctcggcttgtggatgcatcactcctgtcactgctccgtcctcacatgggcttccttcccctccacatcccggtcctccttctctgtgttgtaaggatactcatcattggatttggtgcccactctaatcaaggatgatctattctcaggatccttacctcatatctgcaaagacccctattccagataagaccacaagcactggtgccagggctgggacttggacagatctttgagaggtacacaggtcagacccttctgccattgaatgcctctgaacaggaagacaggacactgtcctagggaaggccagggcagggcgagcaagctgggtcgtagggggacctgggggcagtgctgccctgcatgggctgggactaaggattctctatgtaggaattcccttggcaagaccatggtgccacccagattcctccctcggcccccccactgtccccagagagcacagcgcacccctgatgctgaccgttcctcgggtcatctccttgcttaaaaaacccttgaagcttggagcactttggggtcttggggggaggggggcaccctgtgactcccggtcctcttggcctgctgctctgtctgctgtcatgggaccaattttctttagggattaatctccagttcctggggacgctctttttaaataagctctgtttcatagcatgaaagattttgtgtgggttttttttaaacaaacacaataataattaattcaaggtctaagaataaagccaggtctggaacacggcctgactacagtgtgatgctgaccagcctagatgcaggccgtagaaggctccctgagctgctgggaaggggctcttgaaaatcacctcagggcaggggtcccgggctgccaggctccctcccatgacagtccaggtaggcacagcacgttggaggccaaacagccaggcagctggcgaagcacaggcacctgtggatgcagcctcattttgcttttctctttcccttggatggagtctctgtctcctcactcctgtcccctcttgtctgtttccaggatgtctcctcctcggcgggatctacccccacggctgtcccacgggctgcctcggtgtctggagagcagggcacgcctcccaaggtccagctgcccctcaacgtgtgagctgccctttgtgtctgtcggggtcctgtgcctgcagccctccctcctgcctgggctgacctgtccacgtgtggtttccgcagggttttcccatgtgttactagttggccagtatagttatgtgcgtctaataacaccgctgaagggagagtgtggaagacaaaagtctagcggttccttctgatgtcgttgtttctaggacatttcttctaagcagggaggatattcagagtattcacagtgcagttcccagtcaacaggagaggagccagccatagtgtggagcaagctctccatagcatggaaggtccgagattgaggggagaggcgggagggaagcaggtgcgcagagcagcgggtagtctaggagcttgggtagccactagtcaccaactgcttggaagtggttctgtgtttcagcccccgtcccagggccacaccagcgcatgccagctgcatctcatccccaaatataaccagatgaatcagtgctaggaagtgagatgtttatcttgtttagaaaatctgcccagttaaattacagctcttaacagataagtgcaattttaaaattccccatttaaatcatgctctgaagaattagactcccttttgctcttgtgtttggcagagctcagtcacttgaatgactgtgttagggtgaagtctatgaacttggcaaacaagatgacataatacagaaagttctgtgaatgcagggtgggtagacgtcagagggacactcagaacctgtgttgttacagaacaggattttttgttgttgttgttgtttttgttttgttttgttttgttttttgagatggagtcttgctctgtctcccaggctggagtgcaatggcgcgatcccggctcactgcaagctccgccccccaggttcacgcaattctcctgcctcagcctcccaagtagctgggactacaggtgccagccaccacgcctggctaaatttttgtatttttagtagagatggggtttcaccgtgttagccaggatggtctcgatctcctgatctcgtgatccgcccgccttggcctccctaaatgctgggattacaggcatgagccaccgcgcccggccaaacaggatgtatttcaagcaaaaaagtattttgaagagcaacttgccaagcttcaaaaggtctagaagtagctcagctgctggcacacactcacccacctctaagcccagtggaaacaccagcctttcttaagtggtgggcaggaaagctcccaatatcctcctactataattaaccaatgtaatgaaaggtatttgaaatgtacctattttttacctagcttcctgagcaggctacttccagatgccttgagactgatattcaagttttcaccagcactggacaaaagatactacctccatctcctgccatgctcctagctcagttctggcagcttcaggcaaagctggtgccaaggaggcacatggaaaagtggggggtgatggggctgctcttcttgaagaattggatgcaggatgctatctgaggaaagaaacctgcacccacagtgggatagccctgatggagtttcccaaatgagaggcaggatgcaggtcaggttgctgaggccatgagtgcttcaagggcaaagcccagatgtgtttgttttggagtccccgtgaccagctgaatgcctgtacacaggctctcagtagctgccacttgttctatgagagcaaaggcctccccttcctgggtgcagagggctccccagcttgaggcgagctcaaggcttagccacccaagaaggcttctctgtcctggagacccaaaacgtaacagttccaggcatgtcacccctcaagagttgtgaatattctggaggcctcaaccatggacaaacctccatgtcctggatggcttctaaatttggtgcagatgtggagggacctcttcttcacccagttcgcctgccctgggggacagggttgctgtgacctctagctctccaccttctccctctgggcttctcccccaggggagggcactttccactcagcttgagatttgggtaagagggaagggaaacttatgtgtcggacaacatccttctaaggatgacaaggatttaggtaggaatgtgtctgcaggtgacacagtggccctccatgcaggagctggatcatggtcagcatgacctgtgactggtgatggtccgttccatgtgtgttcatggctgttatactgagtagcagtcacatgccaggcaacattacatacgttacagcagtatgcatgatgcattctgaaaacatgacatcctttattttatccccagagaggaaaagatcagactgacctcatcagtttatgaggaaggggattagcctgactgctcacctatcctctttaactctaagaagctagtattcccacacataccctaccagtggcaagtacccggggtgggggtctgatctaaccattcttcccaaaatagcctctgtaagtcacgttcagaagtctgaaattgaacatgagatgtgctgtcgttgcaaaaacaaccacagcaaacaacagtgcactgctgcccattgcgggtctgcagagaatgatggcttggggactccagccagggcccagatggggctgatgtgaaagtcagccatggaatgacttcaggagacctcattcctgatcttcatgattgcatagctttgacctctccaggccacatcatgtgcactgaaacatgagcccttgagattaagaggcctaatcctgtacggtcagtgtgtcgatggctggatgttcttgccccttcttccagcatgtgaaaggcttccctggcatggattccctaagggctcagttgcccggaaacacaagaagggtctcagtttgctcacccagtgcatggaggcgactgtgagtctgcagagacgtctctcattcctgcaccccctttccaccccctgctgtgttgggctggggcttgtccgccattcctctggcagacctgctgtgatttgggaaagcagaaatatgattgtctgctcctagaggccatgctcctgggcacagccaacccacccagagggtctcaaggttgatgaaatgctgtgagtaggttgcccctgattttgaagggttgattctcacctccacttcttcgtgggcatcttagagccactgcctgatgtgaaggaccggaggaggcagggagagggcatagggctaccctgcaggagccatccgagatgtcctgtcatcacctacagcaatggaggaggtggaggaggaggacgaaacaggcatcagaccgacacgcctgggtctgactcggtccacgtacctgcaatctgagagcaacggaactcttggcacagagccttggtctgggactgcatgtcagcttgccatcagagaaggaaacttccacagtcgatgggtgcagttcattacctgcagggaaaactaggtaccctgtgaggtgcatgaccacccagatggcacctgagggacctgggagtcctatccaggagcccagagaaagacttagggagatggggggttggcctgcaacagggaaagggaagcccaggggaatcgtggccagcggttttcatcctcccctgctgaggtgcagaccagggtccctggatctggtggttgacactggtcatgtgagacgtgctctctgtcatggcagggatgacctcgcagaccttgctgtgatcaggagtgaccccctcatgaccccgctgccatttgtgcgtgtggtcaaaaggccaccaaaccatcctcaataacaacagtccccacattctgggacacaggaaaaggactgctgaccaaaccatgccaacacaagacaggggcaccttccattccaaattcacagaacaggctggtgctgcactcagcctgcaatgaactggatcagcgtgagttcaagacaataagactcggtaaaataagtccctgccaggcttggaacgaaggcctggatcagcgaaatcaccgggtactgcccccaagaggtgtctcagaggccagccgcccagcctcctttgacagtgcccagccttgtggtcagcctggccccatggtcaccccttccaggcatggcggcaccgtcctcaggatattacagacagatgcgaccaagaatatgagagtgagcctgagaaccagtggaggggtgagtactcttcatccccacccctgccgcctgcacctctagagagggcacagctgggaccccaagcaggtggggaaatggaggagatgcaagtgggaagagcagagaattttattgagagagtctctggatgacatagaccctggcgggcaaaggtcggagacgtctgggccgctgcagggccggttgcagtggagggaaggagctgcaggccctggtggtggcagcacatccccaccggtaccggcattgtctaggctgggtttcctggaggcaggccctgagatggggaggtttgtggggagtgctctcaggacacacctgcgctgtggctgaagggaagcctgtctgatcctcggggctctggagctgagacagccctgcggagtttccccattggaagtgagccagcgctggcttcaggctgccctttgaaggggcagtcatgggtgatgctgcaccctgagggagattcccagtgcagccaccacagtgagtgatcagccactcatcgcccttcagaggggacccaggctgggcatccctggaccctgtccagtggtggggcttcagcctcagaatgcagcagaaacacaggcaaacctcatttcatcgcacttcactttgttgtgcctcacagatactgcattttttttacaaattgaagcttcggggcaacccagcatccaccaagtctagtggtgccattttccaacagcatgtgctcacttcgagtctctgtgtcacatttcggtaattcttataatatttcaaactttttcattatatctttatggtgatgtgatcagtgatttttggcgttactgttatggagttgttttgggcaccatggaccatgcccacataagacagcgaacttactcgataagtgatgtgtatgttctgacggctccacggacccaccgtttcccccatctctctttctctccccaggcctaccttttcccttagacacaacaatactgaaatcaggccttttagtaacgctaagtgacctctaagtggtcaagtgaaagctagagtcgaacatctctcactttaagtcaaaagttagaaatgattaagcttggcgaggaagtcatgtcaaaagctgagataggctgaaacttgtgccaaacagttatctaagttgtcaatgaaaagaaaagttattgaaggaaattaaaagtgctactccagggaacacacgaattataagaaagtgaaacagcctaattgctgatacggagaatgtttgagtggcctggatagaagatcaaaccaactgcaacattcccttaagccaaagcctaatccaaagcaaggccctaactctcttcaactccgtgaatgctgagagaggtgaggaagctaaaggaggaaagtttgaagctagcagaggttggttcgtgaggtttaaagaaagaagccatctctgcaacataaaagtacaaggtaaagcagcaagtgctgatggaaaagctgtagcaagttatccagaagatctagctaaaatcactgatgaaggtggcgacactaaacaacagattttcagtgtagacaaaacagccctatattggacaatgatgccatctaggactttcatagctagagaggagatatcaaggcctggcttcaaagctttaaaggacaggcagactctcttgttaggggctaatgcagctggtgactctaagtgaagccagtgttcatttgccattccgagaaccctagggctcttaagaattatgctaaatctactctgcctgtgctgtgtaaatgggacaaccacgcctgcatgatagcacacgtgtttacagcatggtttcctgaatattgtaagtccattgtcaagacctactgctcagaaaaaaaagattccttttaaaatattactgctcattgccagtgtacttggttattcaagagctctgatggagatgtacaaggagatgaatgttgttttcatgcctgctgacacagcatccattcttcagctcatggatcgaggatagtttagattgtcaagtgttcttattttaaaagtacatctttttctttctttctttctttcttttttttcttgagatggagtttcactctgtcgtccaggctggagtgcagtggcatgatcttggctcactgcaacctccgcctcctgggttcaagccattctcctgcctcagccttcccggtagctgggattacaggcgcatgccaccacgcccagctaatttttgtatattgtatatttttttagtagagacaggttttcgccatgttggccaggctggtgtctaactcctgacctcaagtgatccgtccgccttggcctcccaaagcgctgggattacaatcgtgagccactgcgcccggccaagcagtacatttcaaaggttatagctgccatagatggtgattcctctcatggatctgggcaaagtaaattgaaaaccttttggaaaggattcaccattctagggccattatgaacatttgtgattcatgggaggaggtcaaaatatcaacattaacaggagtgttgaagaaggttcttccaatcctcatggatgactttgagtggttggttcaagacttcagtgtaggaagtcaccgcagatgtggtagaaacagcaagagaactagaattagaaattgaacctgaagatgtaactgaattgctgcaatcttatgagaaaacttgaacagatgaggagttgctccttctagatgggcaagaaagtagtttcttgagataaaaatctcctcctggtgaagatggtgggaacatcattgaaatgacaacaaagagtttagaatagcacataaacagttgatgaagcagcagcagggtttaagaggattgcctccaattttgaaagaaattctactgtgggtaaaatgctgtcaaacagcatcaaatgctatagagaaatctatcatgaaagaaagagtcaatgtagcaaacctcattgctgtcttattttaagaagttgccacagccacccccacctttagccaccaccaccctgagtagtcagcaactattcacatcaagacaagaccctctaccagcaaataaattataactccctgaaggctcagatgatcattaacattttagggcaataaaatatatatatatatatttttttttgagacgagtctcgctctgtcacctaggctggagtgcagtggcatgatctcagctcactggaaccttcgcctcctgggttcaagcgattctctggccctagcctccctagtagctggggttgcaggtgcctgccaccacactgggctaattttcgtctttttagtagagacggggtttcaccattttgtcccagctggtctcaaactcctgacctcaggtgatccacctgcctcaggctaccaaagtgctgggattacaggcgtgagtcaccgtgcctggacaaagaaaatatttcttaattaaggtacttacatttttttagacataatgctatcgcatacttaatacgctactgtatagtataaatataatttttacatatattggtaaaccaaaaattcgggtgacagtttattgcaatatttgctctattggggcagtctggaaccaaacccacgagtatcccacaggtatgcctgtacctggagggctgttgaaacacagattgctgggccttacaccaggagctccagggtgaggccccagaatctctaacaagttccaggtgaggccagtaccactggcccaggttcacacttcgggagtccctgcacactagccccacacacaagtgtcaaaggtgctcagttgggaaagacatcagctcctaagctggcctcacagccgtgccaccccagctccttccttccatgaactctgtgacacttggttctacctgggagaaccccatctcaacccgcgtaactgcctgtgggatcccaggaaatcagaaggccccagggagaaccgagcagtttctgctggctgggctgagccagaccatgatgtcagccctcagggaagaggcgaaggcagcagtgctcccggagctggccatcctgaggccatacctgcagctccccaggtgctcgcgcacgctcctctgagcatctgcactcatcctcgccctgcctgcagctcctggtcgcctctgagctcctgagcctgcttcagcccttccacaggacttacccagccctccccagccccctggcctccagtgcagcccctgacagcactcctgctgtgggtcttccctgcagagtgggtgctgcacctagatggaagaggtgaggaggaagcacacgcctccctaattcgagccagcgtggccctgggagaaaagtagaagtgggacttctggtaggagaactgggaatcatttacttattttagaagacgtatgagcaagccaccatctagaggagaaaggggatgaaattagcgaaggcactaaaatactttggtttactctgattagagcggaagagaaatctgcagacaattagcagcaagtaaagatcttgctatagaaataaggaagtagtatgggtaagcgaaggctgtgctgttagtttcaacaggctgcacgtgaaagcagacacatgccatgcccagctgggtcagccgagtcggcccagccgccagcctatcttgtctgtgcaccgtcccgggtgtggtgagcccctggccccatgcctgactgcacacctgccgcggccacttctgcctggaggaggctgtacttgtcctcagcaacctgccctcaagaggcgctttttctcattggcatgaaagccctatacacgctaccaggtggtggtgaggaaggctctctgatcctaaaatcccatgattgccttaaataagtatttgaagtaccaacctgtgagaatccgcagaggtgatgtctgagcatgcagggtggccttggctggtctcgagtgttatggagatgccctgagcactccgcagggcctgtgttgagctgccaaggtgttttcaagcaaatggaaggtgagagttgggctcaggagccaggaggttgtgagccctgctacctgcaggtgctgcccggttctccctgccatgccagacccaggtgcatgtgtctacgaagactggctcgccactgagtgcaggggacgccatccagctcagccaggagactctgaactggcagtcctgacaggactcaactcacagacgttggtgagaaacagggtaacaggcgatgccactgtggctgcagggggcagcggcagagaccctgagaggtgggagggaggcaggttgggaagggccggtctcggcacaaattgctcttcagtgtggtccctccaaggcctcctcttgagtacctcagagaggacagcagatgcagttgacccccacccgggccaaggcccacccaacacgagccgcatgccagaaaacagacccagcacatccatctgcttttggtgtcccctacgaggcacccagaggaaaaaaagtaggcagagaagagatttttcaaagtgaagctaggcttatttacattccagttcccccagcaacctacacctagaggccgaacttaaaatagagatcagagtgaaggattactcatcaacagaacgaacttaaaatttaagatgaagaggccaagtgcactagtgccctggtgcacgtcagggcagcatctccctacgcgttggccacaccgggcctgtgcttggagtgaggagccaacataccccattcaggaccccagcctccccgggccacacctctgtgcaactgcagctctcatcttgcccaagccctgccccagctgtgccccaggccgcgctgacagctccagcagcccagccctggccctacccctgaacatgcgtgaccatggacagaagctccatcccctcgagcttttgtgtccgcagctgtgaaacatgtgcaagaaggccacagacagccctggggaggaagcacgttgcacagggccacccgagcagaggtagccctgctaggggttccatgctcccaggccaccaagctccacgctgtgcagggagcctgcagtagcctggagggagaagtggcccagccccagtcagcgggtgtagccgcagccaatccacggaacaaggcctccacagagcacagcccaccccacacaggccactgagcccctagctctgcaccttgcctaccagcccaggagcaggagggagaggagtccgtgagctgtggtcagcagctagggcgtgttctgagcctgccttggcagctgatgagccccccactccagaggaaaggcagccccggaccccagaaccaactaaaaggagctgttggtgcggcctgagttgcatactgttgcccatggccaggagccaacccggctgcgcattctgcatgtggccactgaagcaaactgttttgacaccataaagcaacagatgaggctaacttaagcaggatttacactcaattgtatttctctgagagcaggcacatcaatttgtgcgtcattgttactgattcacaagccttccacggatccaagtcctccctgcactcttcctctcctcttctgccttcctttgcctcagcccaggctgtgtggaagccaccctcctctcctctccccttctctttcttcctctgtcctctccccgtcctctcccatcctctccccatctcctcctcctccctcctcctccctccatctctctcatcccctttctttcacctctccccgttctcctctcctcccctccagcttccctgcacaatacacaggtacgtgttggctgcagttgtttgtcattttcactggacttttcccttagtggtatttcctctatggtgatgggaacagaatcacaccctggtttctctccatttgtcacctagacatagcattgaaactgtgaacgtggtggggtggcggggtcctctcctgatgattttgtgtatcctcctgaagcccagagttggtcctaatttcactgtcagtgttcaccatttcaaacagggaaagaaacaaagatgccagccacagttggagcccacagcatgtccctaggaggagggcatgagggacacctatcaacaaaggaaatagccaaggtcattgaatgagggcagagggccttgctatgtaggattaggatgttcgaaaaggggggcagatttcatattaaggccaagaaacttttaatctctacaaggttctcctgctattccagaatattccacactggttcttttttcctgcttgagccctcgtgagctgcattctgtttctgttttcacttctaagtggggttcctccagcatcaggagggtgcaatggtggggtctatgagcttccctcatatccccagagatgcactgtgtgcacaagccgctggatagggtcagcatccccacccagcagcctgcactggtgtgaggtccaccagatcactcttcattaacattcatctttggtctcttagtgaactgaggcctccaccagcttccgtggctgaatcttgtgagcaaataaaataatctggtatgttctctccctccgttcaaaaccaaccttccccaaatcccaaaagtagcagagcacttttgtaagtattatccaatctttacaaggaaaagatataggtatagttaagtattttatgagagtagcttggcccatgggctgagttagaggcacagcatctaaaccctaagctgggattttcaccactaaatttgctctttccttatttgcaaataagacttaaaattaaggctggtgtaatcccagcactttgggaggctgaaatgggaggattgcttgagactaggagctcaagaccagtctgggcaacatagtgggaccccatctttacaaaaaataaaaaacttagccagcatggcggtgcacacctgtggtcccagctgcttaggaggctgaggtgggaggatcacttgagcccaggccattgaggctgcagtgagctatgcttgtaccactgcactccagcctgggtgacagggtgagatgctgtttcaaaaaaaaaaaggtcaagtaattaaccatagcacaattactgcaaggaagtgtgcaaccacagttttctaacttaaccacctttcccttaaaaagggcctctgaggtctcttccacctctggttgattggataagccaggcaggaaaaccaggccaggttatattaagtgaggaaaacccagcccaagaatagcttagctcaccctcagttttccctaaggtttcccttgctcagagcatcagactttagaagaggaaaacactggaaatccaaagagctggccctgggatgcagttcagagagtccttgagggctttggggtcactgggccttagggagctgccttcctatctgtcagatgggcaggtggaatcctcctaaggctgtgggtgacaggcacacccctcccctgcaggcagctccccgaaggctccctgcctcgtgggtttgttatgaggagtgagctggggagggtgtgtgaggcctctgtaaactgcagagcccccatagactctagtgggtctttttaggttgggttcctccaaagacaacctccccccaggaatgccggccggtcccctatccccaggagggctcccactgacactggccccatgctttgcccgcaggtacctggcgctctacgcctacaagccccagaagagtgacgagctggagctgcacaagggagagatgtaccgggtcctcgagaagtgtcaggatggctggttcaagggggcgtctctgaggaccggggtctctggggtgttccccggaaactacgtgacacccgtttccaggtgagggcatggtggtggcagcctgggcaaggagagggcaagggcctgcacgccttaccgctgttgttactgctggaggctactctgtcagccgggcccagaaggcagcaaggccaccagtgcccagggttcagcccccactggcgtccccaggcccacatttcaccttctgagctgggtttgcactcaactccttggctgtcctcagcagacattggccaccaaggggagaagaatgggatcaggaggagcagggacaggaaagtcaccagaatgaggtctcaagtgtgaatgtgtgtttgtgtgaggacagtgtgtgcacatatatacagtgtgttcagcgtgtatgctatgcgtgtgcagtgtgtgcacgcttctgtgtgcttgtgtgcatggtatttgtgcatgtgtgcagagtatgtgcagtgtgcgtgcctgtgcacgtgcgtatgcatactgtaagcacaaggtgtgtgcgtgtgtgcataatgtaggtacagcatgtgtgtatgcagtgtgtatgcatgtgtgtgcagtgtgtgtcatcatatatagacgtgtgatatgtaaaacactatatacatatatgcaaaggaaaaatgatatcttcccaaaggtcaacgattgttgagtggtcgcattgtggtaatatatttttttctttgtgttgtcagtgtttaataagttctcagttctactacttttatcaaatagaatatgtaattttagagtcactgaagagacaagggggttgtctgggaatttttcgctgagatgaggatccacagcttggtgatatcagtcagcctcactcacagaagcccctcgtgggcacggccctgtgttgacactgcaggacacacacacagaagcgaaagacgtggccttgggtttctcctgtctttggaacaaggctacagtggaaataaataacctgtagaccctgcattgattgctgggctgattgctacttgcagagtggtctcgggacacatgcggtgttgacttgagcagctctagttcgcaaggcaatcttcagccagggcctctctcgaggtgcccagaagcgggggctaagggatgatggagttgcccaaagcctgaaaggtctgcaggcacaaggctgaaggggcagttagagatccttcgctcaggtgatgctcagcagggaaaagcttgagaagcaaactgcagaggggcttcaggaaatgcaccccctcaaacccagccacctggtcagaggggtggctacttagagggtgagctgcccacagcctcctgcggcttcttcagtggtgtggggtgacttgcccagtgtgcgcagccccgaagaaggtctctggtctggatttcccatgccagtaggaacaggttggctctctcagcctgcaaccggcctgtgcttgaagcccctggcctggagttgggctcacctgtcgtgtcatcagatggctcttccaggaaagcacaggtcacccctctaggttaggggactccctgaccagctggcaccctccaggaaggcgcagcctgagatggcgggtgtccacacctctgggctcgcccgccctgctgggggacatcactctgtcacacgccctactgttatatgaggaggcaggttcttcctccatgcagcaggttagagcagcagcttctgagggaggccatcggcttcccagtttccagtttctctcctctgattcttcctttatctttacctgagaacttccgcagaccttcagagatgtaaagcctgcggttgaaatccagcttccttgcgtagcattgggacatcgcctggccgggcaactcctgacgtgtgtcagtcagtgtcaccacagggagctctcttaggcgcctcccacccccacaacactggactgccttccaccctcttcctgcttctgagttaaatccctgaatatccttcaagagctgggtcctaagtccacttgctatatgaagccttgcctggaggccctcatccttgcctgtgctgtagtcgggatggacagctctgcccacggtgtcatcccaagcagcccactggcaagttctacaggcattcaggatcccccctcacaggccagtccctgggccgcaatagccatctccagccttgtttacctggctccttgcataccatgttcatatacgaggtgctcaataaatgcagatcgaatcaataaaagaaatctagttgttctgatcaaaatgtctcctcaagaactgtcttctcctgctgccagggagtttgttatgggaagatcctccagctcctgacactggagcacttagagtggcccggtcccctccctctacctctgctgtgcacctcatggttgctcactctcctcaagccctcttggtctgtgttttccaaagaatggcagagccaggaataaacattaaggaaaagccactccaaatctagccccggtaactgcagtgtcaggaggtcattgagtgtcctctccggttccttagagaaggaactgcgcccgggtcggctgcccccaggtcagtatgttgaaggccatgggtccctcagtccaatccatagctcagcacaaaacaggaaatctggcctcggtctttatccccagaagtggaagacacctgtccccctccaaagctgtgcccccaggacttatactttcttgatccctactgggttcaggacaattgccaaagccacacagcagaaggcttatctggcagtgattggagggtaggcgaaggcctactccttcctgcatagacctggatccaccacctgtgtttgcccccatcgtgctaggaggccctgaagtgctggtgggctctcggggctgggagtatagtgctcagagctgagcattgtgagtccatttaaaaacctggtgtgggagcaggtatgtggctcttcccgtgagggcacgcactaaggaagtaggactagccaagggtatctctgccatcctgccatgagggcagagggaaagggttttctgctgtcatgagaggcagatgtgtgtctgtatctgttgtgttcagacttgtcaatatcaccttgcaaattagtgactcatcatttgtgagcccactttatttagtttttaaaaatgatttcctcggggaaaagtgagctcaacagatgatagaaaatgggatttttaaattcatggttttggctgacctgctaacaagcttgattgctgggtgaagttcagcacagctctgagggctggggaaggaggacaccacccagggtcccctagcaggtgagtccttttccaagaggcccctctcctctcagctgctgtgcagaaaccctcactctgtgttgccgggagcttccctgctagaggtcgtgcccagtgataccagccacagggagatggctggaccaggcacaggagacggggcaggcagcctgttctcccacctgtggcttcttggtgtgtcttgaaataagatcctgaagggacagaaacaggaatttacccagctcttggacaaatggaagacatttaattcccctgaaactgaatccacagaagcttccaaacccctaactctgccatatttcacatcgctgcctccaggacatggattaattgcaaatacacagagggaaagcgtgaaaagccccatttccagagtgttcctcttgtgtgagctgatgtcatctggaaacttcggagtgaaagggcatctatttctggtatggaactgcaagctcccagacattctcagaaggatgtcgtgctgtgtgtgccctttcccagcagccagcagatgcgaggtggcagtcgtgcccagagggggcccgcgtccttgccatcctttccccaatgtgctggatgtgtcaaggcctcgcgggacatgactgagtcatctgttctttctggatgtatctggagacacacagctgtttgtaagaacaaattaaggcagtagctgtggtataaaagatttcgttcagctcattcctctgtttctcagggcggctttgctatctcttaaatatttcacactgacagtttgcaccccatgaaggttttgtaaacagggcccttctgcccagtgacgggcattgttttaggacctcgtccccagatcagttggccttcatctcttaaagccagcaggtcagagcgaggctctgccagaggcccacatggcacgaatgcctctgagcctctcatcagaattccttctgctttctctccacagggtgcctgcaggaggggcagggccgccccggaataatgtagtcggagggtctccactggccaaagggataaccacaaccatgcacccaggcagtgggagtctgagcagcctggccactgccaccaggcccgccctgcccatcaccactccccaggcccacgcccagcaccccacagcctcgcccccaacaggcagctgtctacggcactcagcccagccaacggccagccaagcccggagcaccatttcaacaggtaccttcacaggggcctcaccctgcagggcatcaacaagggggcttcctgggacatgcttgtgagacacatcttggcccaaggctccagcagtgcatgtgtggctggtggcagcttcatggcagctggagaaacttaaggaaaaccggtttggccccagaatgttgtgagatgaaaagaaattatggggtgggccttaaaggcataaagaaggtaagcacatcttgtcatgctcgtgaacgtctgatctccaggaagttcacttgccttatcatgttacccatcctggcagctgaagtaaatttacaaatatttacacatttcattgtggcaagagggcctcatagactaataagattaacaccggcactttcaaatgcctcccccatgaatgattgtgggccggccacgtgggtcttccatctgccgggccctgcagggcttcccagctaggcggcatctcacaggacagggctggggtgagactcgggcccaggctcttccctttctgaagtgctctgaggcaggaggaatgacagctgttgatccttcgccttcatggcagctggagaaacttaaggaaaaccggtttggccccaggatgttgtgagatgaaaagaaattatggggtgggccttaaaggcataaagaaggtaagcacatcttggttggtggcttagtgttgagctaataagaactgctgatgctggattcgcaggatgatctgggagcccatgccacggcgtcttccaccacggtggagccagtgatgctgacatgatgccaagtaccccaggacaagaggggataacacagaatctctcttcccaccccaaccctgtcctctcagaaatcatctgtttttctcaaagtgaggcttaaagggcaaaaataatgtaaattcatggaagcaataaaatatactatttcttagactaacgaacacgatgacccattagaagtgtccagaaagcagcttctcaagtgtggaaagaggagacaacacttaggtcagcagaggccatatttccttccttatcttagctgatgggacaaggggtgggaggtaagtgtctgtcatccacttgcccacccaagtgggtgcagggtagacttcaggtatccagtgcccagcatcgtcactgggtgcaggtggactttgagtgcctggtgtctggcaccatcagcaggtatagggtgaactttgggtgcccaatgtctggcaccatcagtgggtgcaggtggacttcaggtgcccagtgttcagccttgtgctggtggtgtacctgtcaagcagtgggtaatttagcactaggaaagcttcatgggtggtctgaggactaccctggtgtcagagccttcaagacctactctgccatctcagattctgtaagtctctactagtatcttttttacttaaatcagctaagaatgattcttggttttcacacccctggctccagggccctgggaaagaatctgcagcaatattacctggtgcccaagcccaccctgcaacccatgaccttctgatcagccgtccttcagcatggtttacgtggatctgtgttttctggtagcctctagctggggatacagtcattgcagttggcaagtgatctggtgatctgaagttgtgctccctgactggtcagaggcagccaatatgctgatctgtttggccactggagcacccaggcaggaccaggggagcaaaagtcccaggccaggtcccttctggttataaacatctcatccaatcagcccggtgttctgtacaaatgtttccacatgcaccagcactagaaagggtgagtggccccactcatcacggtgagtcagcatcccagtgcagtggccctgggttgtctgcccagaatagccagtataatggtctttccacaccaagccttgctagaaacgttcccaattcaaagaagaaatggagccctgccagtcacttctccctctgtggaataacaagcaggatcaaaagaaattggcaaggctgtggggcagtgcaacattgtgtctcagtcctccatcaccatagtaaccatgagggtgccacgagcattctcttccatcagtttaatgttacacacggggagagtgaggcacgggatggttaaacggctccccagtgcatcccagcccagcacttgtccccacgctattgctgtcacagccaggttaaagaatgactcctactgagccatatcagtaaattaaatgccactgagttcctgcggcattttccacttcattctgcatttagagagagaaaaaacactgttgacagtccaagtaatggattgttccctgcagtaattgcccatttcagcagaccccaaccccgatgggtgggaggcatttcatcaatgttctcatctcgagccaaagtcaggcagtttgacaaaggcttaattgcattggccatagcatccaatatgatttgttctacttgattaatgtaactcctttcccaaaggcagagcaccccctgtaaagtgccagtgttccttgcacactcctgtctgtgcttagcaggagtaagagcccagcatagccatgaattcatcagcaaaaaagcaccgagaaggagctagatacaggcaaggcaccctgcaggggtctggaaacagaggaaaaccagacaagccccatttccaccccggttagagagaatgactagaaaacaaagttctgtggtgggtttgctaaagggctgcaaaagaggcctgcttaggtattaagagagtgtggaggagggaattcattccgactggggaggaaaataggagggggattgggagtagggcatatggaaagttttcaagaggaggtgataatgccttgaatcttaaaggacaaataggaagtgtctgagcagacaaaagagaaaggaggttcagagcagaggaaccagcatgagcaatggcctggcaatgaggaatagcataactcttgttttggggaactttatttagttgtgacatgactgaagcaaagctatggaagaaggagaagtccagtgtgtagatgacagttccctgcagaggcatactgtcctttaaatctgaaaggtgggtagagctcagcatgcagcagtaggagagtgtgggaagcactcaggaaggggaagcatggggagctcttgggccgccgaggccaggggcccatggacgctggaatacggatagggtgcgggagcaaagaaagacccgcagtgaagccgaaaagctaagcagagcagagcatggaggttcttctagaccacgtaaggaatttagatgtttatcctaagggggcacatcaaagggtgttgaataatagacatagtcatatttttgtatttaaaagattgagctagacttctgcttatggccaatctgaagtgatgaggacaggaattactctcccacatgaaacaaatttaaaaagccaagtatataaaacaacagttttcaagacaccagacaaccaaggactgattcatgagagaagttgcaggcagtggcaaaaggaggcaggtaaccaggtggaggagccccgaggatgtggagatcagagtttgtgtgacagagagggcttgagtttccagggcagtgaccagagaggagagaacagcacagagaggctgcagagcacgccctgagatcttcaggtgacaactcatctgcatatgaacatgagaaacgtacccaaagccaggaaaagaatcaaagaaagaaaggattagtgctaacagtgcccagaatacacaccagctggaaatagtgcctgttcccaccagccagacggaaaaattgcagaaatcaccaggcattgagtaatctacacaggaccttgcctctgtagtggtcagactgagcactgttccaatttcacccaacagagctcaaaaacaacactcaagagtcaaactatttctgattaatttatctttgtcccagaacaaagcttaagaatatttataggaatacaaaaaaaaaaaaaattccagctctcaacaacataaaaatcacaatgtctgatgtccaataaaaaattatgaggcatgcaaaggagcaggaaaatatgacttataatgaagggatcagtcaatcaatcaaaactgaccccaaattgacatagatgttgcaaagacatttaaaaatgatattacagttgcctttcacatactcagaaagttaagtagagacataatagacccaaatcacacttctagaaataaaaactacagtgtgtgagatcaagaatatactagatggaattaatggcagattaaacattgctgaagaaaaaatatttgtaaacttgaagatatagtaatagaagccgtggaaagtggaacacagagataaaagacaattttgaaaaatgaatggaatccgtgagcaatgggacaactttaagtggcctaatatacgtgtaattggaggtctccaatgtagaggagagaggtaggacagaaaaatgatttgaagaaataatgaccaaaattgttccaaatttgatgaaaaccacaaacacagtttcaaagacagttggtgaacaccaagcacaagaaacatgaagaaaactgtaacaaggcaaatcacaatcaaactgttcaaaatctctcataaagaaaacactgaaaacagccagaggacaaaaagatacattacatgaaatagaaaaaaagataagggtaaggatgatgtcaagaacagttcaagtgagatgacagaataaccaaaaaacatactgaaagaaatatagctgtcaatctagtactctactcccagcaaaaatatctttcaaaaaaaaagcaaaataaagaattattcagaaatagtaaaactaaaagattttgtctctaataaatccacactattggccaggcacagtggctcacgcctgtaatcccagcactttgggaggctgagacgggtggatcacgaggtcaggagattgagaccatcctggctaacacagtgaaaccccgtctctactaaaaacacaaaaaattagccaggcgtgttggcgggcgcctgtagtcccagctgctcaggaggctgaggcaggtgaatgacatgaacctgggaggcagagcttacagtgagccgagatcgtgccactgcactccagcctgggcaacggagtgagactccacctcaaaaaaaaaaaaaaaagaaaaaatccacactattagaaaggtaaaaatgaaattatttagaaagaaggcagatgataccagatgaaaatgaagatctatacaaaggaatgaaaagcactggaaatggtaactacatagataaatatataagatgttttcttattatttgaatatctttaaaatataattgactgtttaaacaaaagtgaaagcaatctagtttgggatttaaaactcaaaagcaaaatgtacaataaacaaaaacacaaagtttgggaagggagaagtggaagtttggtatactactgtaacattcttatactatgaatctttatgttatgaaatcatttgtaaatgactataataaaataaagatgtaagcagtcactaaatatgaaacaaaaagttacagcaaataagctaaaagggaataaaaaggaatcatgaaaacatccaaaagaaagcattaacagaagggaaaagaaacaatacatgggtcaaagagaaaacatatagtaggatggtaggtttaaacctaatcatgtaagtaatcacactaaatgtaaatggcctaaataaccctaaatataattcagagattgtcacatattactaaaaacaaacaaaaaaccaacgatatgctgtgagtaagaaacatactttaatacttcaagtctaaagacataaataagctaaaagtgaagggatggaacaagttatacacattctcattattcatggtagttacattctatgaagttatcatgaacactgaatttgtgaatactgaactattgcttctaggtgaaattgtgtgtggcatgcgtgcatgggtgtgtacacatatctcacataaattatcatcttattctagtagattctattttatttatttgacaaaagagaaaatgaggttcagaaggattaagtggctgacctgaggctgccctattaacaggtgccagagctgggattcaaatactgtccaactggcctcagagccaaaactttctgcattgtactgtgttgccccctatcggctctatcctcctgtcatctctgtgtgacgctgaaacaaaaatcgccttgttcaacctcagctgggaatatgagtgtcaggcaactcaaatttttgccattccatgaatgtctgaaaataactgaaagcaccacagataatgacttgggggttacaaatcgtttttcactagtagaagaatttgcaaatacagaatctgccaataatgagaatagattatatgatgctaatattaatcaaaagaaagctggagtggttatcttaatcagatagagcagaatttataaaaattattagagataaaaaggcaatttcgtaacaataaaggggtcagttcatttagaggacataacagttctaaatatttatacaccaagtaacagaacttcaaaatacataagcaatatggataaaggtacaaggagaaataaacaaatctacaattatggtcagagactttcatgtctcaataattgatagaacagttagatataaaatggtaaaaatttaaaacattagaacaacagtataatcaacttgacttagttgacgtttgtgaaacattctacccaacaacagcaaaatgcaccttcttttcaagtgcacacagaacatttactgagatagattatgtactgggccatgatatttttaagtttcagcacatttaaagggattcaagtcatggaaactacattccctgaccacagtggcattgaattagaattcattaatacaaataataacaaatatttgatatactcaaatatttgaaaactaaacagtttacttcaaaataacccatatattaaagaacaaatcaaaagggatattataacgcattttgagctgaatgaaatgaaaaagaacagtgaacttgggaagctaacactgatttagagacttcttaaaaaatacagtaattaagtttatgtgatgttgttgtaaagatgtttgtttttaatatttaaaaagtcaactctgtgggtctatataaaatggaacacacaatagccaagtgctgaagcactggcctactggctgtaggataaaaagcaggccttgttgggtgactttcaactcctgcaggagaatatggacaggaagcccctgtgagaatcaggggaccagagctaggtgtgccagttctaaaaattccatcattttccaggggatgggccatactaagcctccacctggggtgtgagagaaagaagagagagccccaaccctggtcatggtgctgagtttgaggatggctctggcctgaggactaggactagctcagcaccctctctgcaggaccagaactccaagaagcccattaaacctagttctaagggagggtcctagaggccaagcagcactaacaacagaactgccagacccagaaaagtagacaaagagccgcaagctcagggtgagctggcacattaagatttcaaaacacaaaagggaaactcacacataagttagccaataaactcaagagataggaggaaaataagggagaaatctgagagcatctttgaaatcagtatgtttaagatctaagaggaaaagaaggaataacatatacacacacaaaaaagaaaaacaggaagctatgaaaaaataggtggatggctatgaatcagaaacaactggatatgaaaaagaaccaatttgaaattttggagaggaaaaatatatatttaaatacaaaacctctgtaggtagcataaactctagacacagttgaaagtggaattagtgaaattggaaagccatacagaggaatttatccagaatacagagcagagatgaaaaatgtgaaagagatgtataaacatggaggatagattgaggagctccaaactacttctaacaggattttcataactagaaaatagaagagatgggacagagagaagattcaaaggagtagtccctgagaattctccaaaattgaagaggggctcaagtcctcacacagaaagcacaaagagtgctgagtaggaaaaataaccaaaaatccaagcctaaacatgctgaacttaaacttaaagcatcaaaggataaggaaaatactacaaaacctgccagagggcagatacagattacttacatagaaatgaataaaaatataagaaagagccagtgtacacactatttcaaaaatattaagtgtaaagaaaaatgggaaaaggaggtactagctaaaagaggacaaggtatagaaggaagattatttattaaatgggagagacaactggttaataaattatgggggaaagctaataaagaggctaaatatatgagagaagggatgagccagagaaggtatcaaggatgtgggtgaaggcgttgacctggtgggacccagagtccttgtgactggaagggaggggtgtggggaagtagagaggggggttggcttggagttgtgggagttccatttcatccctgaagtgggaagcgatacccctgaaaataaggaaaggacaaagctggtgatgcaatagatcatttattcattcccctatcatttataaagcacctacagatactagggacatagaatgaactgagtgagggctcacagtccttggaagctgcagcgggactgaaacacaccaaaagtttaaagaagagaggaaagggaaaagcagggaccatgggtggtgctttcctaagcagccttcatctgtcagcttgacttcaaagaagatgtgggctactttggcatcactaacgagtagtcccagccagctcggggttggggcacccggggtgggtgaaaataagggtaaatcctaccagagatgagcacactcttcaccagccagtgtcatgacctgagctgtgccttgctttctcacgctacagtttttcttctccagtggttccattctgtgaaatcggaagtgacatggctggggttcttttttcctcagagactcactcttttattcaaaaaatgtacagagcaccttctacatgccagggaccattgcgggcgttatcgtgaattaagcagccatgtccccacctcatggagctccgttgcacagtggggacaggcaatgaataatcagcctccagcgaacatgtaaattacacaactgtgaggagctaagagccttgggagcaaaggaaagctggagctagagcaggagcaggggaggctgaggctgcagggtcaggcagcaccgtgaaggtggtaggcaggtctctagaaggtggtatctgagccttccaggcacccgagggtcccaccttgcagctatgagggaggtgaggtctatgggcaggggtgctggcactgtgcctctgaggtgaccaggagccagtcctattggcagagtggccaggaggccagtgtggctgaggggagagtattaggaggtgaggttggagcttgctggaacacactccctctcttctttggtgcctgggatgagcaaagtagtgcggcaggcgaggggaagccggccaggaggtagaggccagccacgcacagcccaggggcacagaccctggtgcagtcccaacgccgagggccacagcgcttccctggcaggctgtcaccccccttccagggaccctggaccgagagaaggggagtcagacagctgaggggagagacgaataaatctcgaggagcggcctctgagtcagggtttccagggtgattaaatgacccgaggcccctggatctgcgtgattgcctgacctgctctccttgtaaatgtggagctgtgttgggttaggatcaaatgtttcaagtttccaacccagctgaagccctgaatatttaaaaaaaaaaaaaaaaaaaaagaaaagaaaaagaaaaagaaaacagaaaaaaaaaacccacataaatcagcctttctgtatttcacctcgtagaaacagcaggctgcctaagtcccggagaatctgggatcacataattagatctcaccagcgcttcacacacggctgtgtcagaagaaggcctgactcccagatggagagctttgtatgtctcacggtgctacttcccgtggcctccaaacgctgttaggattaacgagtgcatagttgggggctgagaagattgtttttattgcatgtattttctttcatgctctgaagccatgaatgccacaaagtctgctggtagaaaatgattacagtatgacataatttttctctgccttaagaatgcacagcagctggatgtgagctgcgtggtgctgcccgggccacttggtataaagcagtgtctgatgctcagcccaggtctccacttgggccagaacaacccaggacacaagtcaccattcccctggggccgttcattctctcccagcatttgtttcatccatatttattaaggagataattccctgaaattactaacacacatagtagcaggattactattaatgtggtgctgtgtttaaagggagctgtatcttttcatatgggagatttttgcaaatgttacaacttgcaatccctaacatctttaagaattgtttttgctggcagcaaggtggtggatccacagttgtaaggttccagttttgtaaacctggaagcccggtgcttcgacatgcaggcagagcagcaaatgcaggcagatggcagcagggtggtgggcggcttctcctccaggctgctgctgggagaaacgtctgctgctttcttcctgcaattgtccccagccaaggcagctctcacatgctcagccctcactcttgctgagtgacatacccagtgtggaaaccaaggaccagccaggccagttcgggatcaagagtaactagagtcaagcttggtcggcttgcatgcagtggtgcttaataattcaggggacatcttgaggcttcactgagatgctttcacaggctttatgtttatgagcattttacaaccatatttcaaaaccatattttcaaaatttttctgagtgcttcagctcatcacagcagagaaaattatttagagcaggagtccccagcctccaagccacagaccaattccggtccatggtctgttaggaactgggctgcacagcaggttgtgagtggtgggtgagcaaggaaaacttcatctgtatttacagcccctcctcaacgcttgcattaccacctgagctccaccacccatcacattagcagcggcattaggttctcataggagagcaaaccttactccacttacttgggatctaggttgcacgctccttatgagaatctaatggctgatgatctgtcactgtctcccatcatctctagatgggcctgtctagttgcaggaaaataagctcaggggtcctactgattctatgttatggtgagttgtatacttatttcactatatattacaatgtagtaataatagaaataaagtacataacaaatgtaatgcacttgaatcatcccgaaaccatcccctgcctcagtctgtggaaaaattgtcttccacaaaacgggtccttggtgccaaaatggttggggaccgctgagttaaaggacttcatagaactgggaatgtgcccatgttcatggcaaccttggcaaagctgttttagctccacctgaggaaaggggtgttttgagccgtggcagggccccctgatcccttgggctttggaagataggaatgcattttcagggtttcttggcctgtttctccatctgtgaagaggccaggtctgtctggagaaacttcagagagaggctgtgagtgctcgagaagggagcctgagtgtgcattgcagctgcctggcaggcatggcaagttgcaaactaacctttcaacctgctgtctctccaaccccgtctccagctgcccactctgcagcccaggctcaggaccggccaactgccaccgtgtcacccctgcgcacccagaactctccatcccgcctgcctgccaccagcctcaggccccactcggtggtgtccccgcagcacagccaccagcccccggtgcagatgtgcccacggccggccatccccctcacatcagcagcatcagccatcacacctcccaacgtcagtgccgcaaacctcaacggggaggctggaggggggcccatcggtgttctgtccacatccagccccaccaacacgggatgcaaactagacgagaagaaaagtgaaaaggtaagaggcccatcctggacgagccctgggctcgaggccagctgcttactgtaactttttggcactagatggcagtggcatttgtgcaattgaagctagaatgtgggctccaagtgcctgcccctagatgaaccaggcgtgtgacagagagggagccaaaccaccagagcagctggttggagaggaatcaggcaggccttgggtgctggcagggccatgcaagtccagctacatttctcatgcaaatcagaaaaaggtgtcccctcttgaaaatgccttagttccatctgttgtaaaatcattgtaatatactcattttgttagaacaggatatttattgccatgtgctgggatattgtaataataaatatacaaatctacgtgtgcagtgtgaacagcacccactcccttcaatatgtcatccttgtgcagtccacaacctgttcaaccatatgggacaggcctgtttcctgaggagcaatgagaaggaacaggagaatgctgacctgatggctggtgtgttttttagctattcttttagccatgaagtgctgatttcataaaagaaaatctgggccaggcgtggtggctcaagcctgtaatctcagcactttgggaggctgaggcgggcggatcacctgaggtcaggagtttgaaaccagcctggccaacatggcaaaaccccatctctactaaaaatacaaaaattagccaggcatggtggcgtgcgcctgtaatcccagctacctaggaggctgaggcaggagaatcactggaaaccggggggcagagcctgcagtgagccaagattgtgccactgcactccagcctgggcaacagagcaagactgcatctcaaaaaaaaaaaaagaaaaagaaagaaaatctgagtccaagaaacttgttccggttgccaccctgctagacgttagattaaccaggatgagaatccagacttctaaatcagtgctgtccagcagaaacataatgcaaacctcaaatctaattttaaattttctagtagccacatttttaaaaagtaaaattaattttaaagtaaatttaaaaggtgaaattcattttaacagcttattccattaaacccaatatccagaatattattgtttcaacatgtaacctatgttttaaaattgttgatgagatattttagtattttttttttacgtgaagtttttggaagcccatgtgaaatccaataagcaattctccagggctcagggcccatgcactgcctgaggctgtatccctagggcgttgggctgggtgctgggcaaggagccactctgtgtattggccttgctgcctgaacggtttagggattgttctctcttggcttgactgattctgcagatcttttgacatctttccatataaaattagtctttggatcaccctggacactagatggtgtgttccaggcaaggacagcctctctctctttctcgaggacattgccaaacccagcgctgactcggcgggctctctgcccatcaccctggaggcaggccctgctcccctgtcctcaacatgagccgggaacgctgcagacatgggccacaccaggttccgcagggcctcagcacctcctgtgttgttcagtccagagcaatggttgttcccgtgctgactggtgtggcagagccaatgcagctagcaaagctcaggtctgctccagcctaacagggcgcctggcatgaagggcaacagctgctctgtgttttgtgtgtctgtttgaagatcagttcagtcttgaatctgttcccttctaccctgcagcccttgttatgagatgtggctgggtctcatcaggagggagaggtgggattcacagtcctaccctctcacttaagcattcttccttcttctgagctgctcagaaacaaccaggggcagacttggaaagtgggggctgtaatagttccttaagcatttctagttctttgcccaagaattccctctctctagtttgtgaagcaaatgggactggcttcaataataccattgctgagtgggtttctatgacattacgtcctgtacgaatctacacggaggatgatgctgttccccatcacccacctaagtgtgaagctaatgaacaccagctgagtctgttcctagcctgcctgttagacactttgtaaatatttcgctttctcttaaggtttatgccctctaacagttgtgctatatcagcaaagaacagttgagtccagaagacaccccaacatccctcttgatgaaaggcgacatgcagggacgccctgccatgcaagctgcacatacagtggctcagcctcctcctcccctgatagctcccgagcctctgtgggcagcagaagtgcgtaggccacgcttggggctggacacatgctgtgggagcagtccacgctgcactccaggcaggaggggaagtggtttttgtgaggccctctgagcttatgtccagaggttcagcaaaccccagcagagaagcacattgccctcccacacattgtgtgtgcttttcattcccacctctcataaacaacaaagacaagcactggtctacaaaaccacctgtgaacattttgcccatctgtgttcccacttgaatttctcctaatttgcagcagggcccaaggcatttacagctgccatttgcagcagaagagcagaaatgatggtcattttagtccactgctcagaagcaagtgagccagtgtgacctgcaccagcagactgtgctgggctagggggctgcagccagcacactccctgcaggccgcttcctgagccccacccctccatgactacactaaacaggcttcctaactttgggcaacttgatcatagatgtacacatgtctaattatggcaaaggttttttaaagcatttggcagtattctccagtctgtttctgttaaattttctttgggaaaagacagtgagctcctcactcccacatccactgatgcatatacctcagtgcagcgcagtttcctagcgctagtgctgctaaattccacccaggcccttccatgcatgtaccagagagaaggcagggtggatacagctcctgggcgccgtagagtagggagtaattttctcctaggagcgtgggagatttacgcgccatatccctgtgtgtggagaaggaagaagccccaaaaccagctctgtgttgtgtggtgtcagtggctatggtcaaggtcccaggaggctggttcccgggaggcttgtgccaggaggcttgtccccaggaggctggtgctggcaggctggtcccaggaggctggtccctgggaggctggtgctgggaggctggttctgggaggctggtgccaggaggctggtccctgggaggctggtcccgggaggctggtgccaggaggctggtcccaggaggctggtcccgggaggctggtgccaggaggctggtcccgggaggctggtgccgggaggctggtccctgggaggctggtccctgggaggctattcccgggaggctggtccccgggaaactggtccccgggaggctggtgctctgctgctatatccagggggattgggcctttgagctctgttccctgcgtggcccgatgtggtgtgcaggcctctggggataatacaagtgcagacagagtggcagttctttctccagacccattcctgaaccagagctcctctctgggcccaggcatctgccagcctatgcaggaacctctccagcctactctcccaggtctcttcctgcccacctgcctgatcatattgctccctgcaggggctgccctgtggccaggcccccaacacccacaagttacacagtagaactcaaatctggttttaaaaggtggtcttcaggatttaagttatccttttgcacttaaaaatgaattttgtgcttgaaacaaccatggaacactgcctattgtgtccatccgtgacagttttctggttttgaaactgtgtgagcacatcagcaccaggtgatacgaaccctcagggtacctaagtccaggggagagtcacccagaagagaagggtgcaatgggctgcgtgcagttggcatccctaaccacccgaccggccatcactcactctcttacttgtgccccaatccctgactcatctgtgtattgcaaagagcatgaggatgtacctggcagagcgcaggcacacggttcataatgatggaaaggtcaaccctggcctggaggagccagagtatagtacaggtcactgtacaggtaaacaggcgattgattgcaggagagggtgggtgattgacctgcgtgtgggaacagagggtcaccgacaaaggcgcctggtcagcccaggtcaggggagacttcccggggcacagatgggaggatccttggctgagggtcagcctgagcagaggccaggggacatggcccgaagatgagggccagggacgggagaggtagcaggcagccctgggagggcctcgttgccaactgctcagcactgcaaaatctgcagatgctgggcaggagggtgccatcctgtaacttaactacttaaatatcctgtaacttaaatactatcgtataataatcatatcatataaaagtcagtgcaacttacattacatggtgagataagagagagaagaaaacaaaggtactgcttaatatacacattcacacagacatattcataataaaataggaggaaatacttacaacaattacaatcctcatttctgtagctgttcacatggtcgtggctggtatttataattactttgtctactatccaatctgtattccccttcccttcagaaagcgcctcagctgggcatggacccttacctggtggggtgacccgaaccttcactcctgaagggtctgggccatttttagtcctgtctggattgggtggttatagttttccattgacctcaggaaggcttgagcacaggccatgagtggtgctccttgcctcctcggggttctgagcctcttgctgtccctgtgcagttgaccaagtccacacggtgagagcgctcccgccggctgcctgacttctgtggagccctctccttggtgctgaggttccccaaggctctggcctggccatgagttccacagcagcattcttcaaatgatcaatccagtggattgggacccacatttttatttagattggatgggataaacagaatgaaacagggtaggatagatcttcatggtgagcatacagtagggacggtacactggggagcttctgtgttgctgtgtgcgagtcctgacataaaacttaattcaaaaacatctcgaagccttaggtcgacaaccccagcccatagaaggcacctggtgatgattgtagactaaagagaattggaaaaactgctgccagtaagttttcactctcacgacttatgggaaattctttatgggccagaaaaaaaaaaagttaactctctctttatgggtgtggtagttttagtttcagtgagtaatagaatattgaaacttgaaagagcctctaaagatgttttatattaaactctccattttccatgatgttcctgaggctcagagaccttcagagacttgcctggggccacacagcatcggcagtggagctggcatgggaatgctggcctcctgcctcctgtgttgggtccaagtgctgactgtggtggcctcctagtccctgggaggtcatggcccgtccaggagtcccacagtgagacatccagggtagcggctggcaggagaccatgaggctggccttggggggagaaagggccctaggtgtctgccttctgggtccacattggacccagccacagccagaacccatgcaacaatgaatcacttaccagtccatgtggatgaccgacataatcaagactgcaaacccaatttggtctgaaaggaacagaggacctgacagaatgacccataatgacagcagcaaggcctggtctggggcgtggagtctgtgggacacatgtgtgcacccacccattaaatatatgtatatctcatatatgtgtgttactatggcatatacactcatgatattatataggagtgtgattatatttttcatgaaaccccaggaacatccaatctgaagaaatcttgaggatgaagctcttttgagtggccaggcagctctctctaaagtgaagaatcgctggcttataaatgtatttcctctcgagtggaggcaccctgcaataggtagacccttactcgtccatcccagttctgtcgacaggcagccggggaagccagctgctgccagcgctcatcccagcttctccaggtttaccagtgccattcacttccgaagtgacagctacactctgctggcacaggctggctgcatgctcccaccaaccagggtggggaggggcctgctgtcacctgcacacactggcatgagaggtagaaggggctggatctgacctcacccagaactgattcacccacgtgggaaccatcatgcaggtcttaggggagacctgccctgcagcctgctcacggagccccttggcccatgctctgtcatcaggtgcagccacagtctgatgcatcgctgggctcccaggcccactgggggcttgggaacctcaggtctgccgcacagcaaagtcactgaagagtctcatggtcagccatgggccatggaaaccacctctgccctggccacttgtgcctggcagctctgctggttagtggcactggcgttggctgggcagaaggggtcgcagagtcagccccgtgtggctgggagcaccggcgactccaggtcctcttcctgttcccctattgtcaggctgccttccgagggataaggggagccagcatgtgcggctgaaaatgaacccatcctgaaagcgtgaatcccagctgccaaaaaacattttgaagttttccagacagccttttttggaaggcataaactgctggagcatcgcttcactggtgacaggagtggcaacctttctctaagttaggaatgtcccgtcagagcacaggccctcagtggggcagggcagtggcccagcctggtctgagcagaggtcagtggtggcctggaggcttctcttgttatctgcgccctcccaggacagcaagtgaagctggctgtccccagttctcctgtagaaactccgtggcctctgcattgggatgagacttctggatctcagcgtggttgtgagtgctggtgaccctttcagggtacaaatgtggacatgaagtccagagaggcaaggtgacctgcccaaggccacacaacgagtagggcactgggaatgaaaccaggctccatggtacccacaagtgcccactccccattctctgctactgctagtcagcttctcttctggggagaatagcctagggctcatgccgctgagccttcagaaagtggcagggacgagggaaggagcacagtcatctcaacagcgagtgaagcttgaatttggaggaggaagacacagtggattaatcagcatggagggtggacctggggtcggctgcctagtgtgaatcaatctcctgtttaccaattatgtgacttcgagcaagcttctccaccttccatgcctcagtttccacatctgtgaaatggggacgatagcacctaccaccctgagttgttgggagtagtaaatttagttagtttgacgaatgcataacatagtatttagaacaaaagtattagaaattattattaagaatttgatagttaattgaagtctggatcctagaattaaatgatccatacagatgtaaaacttatatccccgaggcttctctaaaagatcaaaggaggggttaattttgttatatgaacaatgaagggaactcaagtaaactattattcagaagtagggtttcaactgcaaagcattaaaccaaaatgcatttttaaaatagtaatacactttagaaaatgaaaaggatttgtaagtcatgtgtaatagttgtgagggttctgccaccctccccaaagggcactgactaataacgagtaactaatcaggattactgtgaaatcctacactctagtgccacacgagctgaacaagcaagcgatgcgtgtgacagtgtggctggggcgagcgatgcacacactgcatggccgggagccccggcacaactcaattcccacatcaagtctagattctgttctgcaaaattctactgctgtgactgccttctttttcaactgatatattctcacagtgctttcaaagacatgggatttttttccagccgtccatgcccagaaaaactcagtgatggcattagttcagaagaaaaacaagcgcacaccccataaactacatcagaaggtaatgcccacacatcagacccagccgtctgtccctcccagaaggcaacaaagtcagcatggcggggcatctctgaacattccacagcacttgccagcactctccattttggtcccataactgagggaaatgtcgagaaagaacagagagtgctgggttcggcattctatttgttgtggttttattttgttttttcaggcactcaggccatgtggtgcaggagccggggagggcactctgtaacctcaagggaataagacggcttcataccatcatctccctctaggggaagtcactcctgggacagtttggtttttattcacctgataagctatgtgcttgcttattaaattccttccaggccgcatcttactacattataggacacatttgtatatagcatgagaatgaaactcattaatcttttcagaggattcacactctgtctggatctcaaatagaaccaataggtcaacttcatgaaaatgttattgctataggatttctttgtaagaccagcagaaatggctagatttatggcttcatcacctgccttctaactcttatttattctctctttcactttaaggtcaccttacaactcccctagacttcagtttatttagtgtgaaaatgggaataatgtctttttgtactcatgggaatactataaaaattaattattggtttgtatcagtcagggatctccagagaaacagaaccagcaggagacagagagagagagagagagagagagagagaatttatttattttaaggaattatgtgactgtggaggctggcaagcctgaattctgtggggcagcccagcaggctggaccctcagtcaggagttgctgtgcagtcttgaggcagaaaatcattgtccacaggatgcctgtgattgctcttaaggccttcagctgattgggcgaggcccacccacattatcaaggtatgtactttcagtaatctcttttacttaaggtaaactggctgtagatattaacacatttgccaaatgccttcatagcaacatctagattagtgtttgctcaaacaactgggtacctgcctagccacactgacataaaactcaccatcaccgtccatcctttgtcagcttgacatctccctaaactatacttagtttccacataaagacaaaagcaaagtcatacttctgcctaatatgatacaacaagcctgactacaccaagagtgcatgcgcccttcccagaagaggattcagagtctttgagtggtgcttcgtcttcttcttgatatcttgtaacttaaatactatcatataataatcatatcatataaagtcagtgcaacttatattacatggtgagataagagagagaagaaaacaaaggtactgcttaatatacacattcacacagacatattcttaacaaaataggaggaaatacttacaacagttacaatcctcatttctgtagctgttcacatggtcatggctggtatttataattactttgtctactatccaatctgtattccccttcccttcagaaagcgcctcatctgggcatggacccttacctggtggggtgatccaaaccttcattcctgaagggactgggccatttttagtcctgtctggattgggtggttatagttttccattgacctcagtcacggggcattgtgattgagagcgtgctaggagacaccccaagggatctcctgtatcccagacatgctcttgcccatgtccactatggagtgcagtccagtttcccacggtggtcaggatcagtcacccgagccagcacagtagttcccgttcctgcctttgattctaagccacaaggatcccaaagcggctgagtggcagtcttgaattccagctcaatggaatcattgtcatgtttcctggtggcaacattcctccccctggaaccaagacctctagactagtagaacataatgttgtgagaacaagaagcagacattttgctagtgggttactaggggtcataataagtggtgcttctcccatttctgccccatgattcctgggcccatgagtcctggctgtaggagaaatagcaccatatatttgatgctgattcagagcatacccagccttctggagaatattgtcccagccctgcaagggactgtcacccagctggtgctgtaactgagtcttcaaaaggtcattctacattctgtcaagccagctgccagcataatggggaacatggtagagccagtgagttccatgcacacgagcccattgctgcacttcatttgctatggagtgagctcctcagtcagaagcagtgctgtgtggaataccgtgatggtggttaaggcattctgaagtccatggatattcactttggcagaagcattgtgtgtagggaagacaaatccatatctagagtgaatagtatccattccaggaaggacaaaacaccattgccccttccttgatggaggtggtccaaggtagtcaccttgcccccaggtggatgctgaccatctcagggagtggtgacatgctggggactcactgttgttctctgctgctggtggattggacacagtggtagtcgtagccaggttggccatggtgagtggaaatccatgatgctgagcccatgcatcacctccatccacagtggccactctgttcatgggtccactgggcaatgacaggaatggctgaggaaagaggctcagtcattgactgtgctccacagaatcccatctgtggaattactaaagtcctcctctgctgaggtcaccctttggtgagcatttaaatggcacacaaatttcaccacatgttttcccattgaaagaggtcttttcacatgtgcttttccaatttccttgtcaccaattttccaattatgtttcttgcaagtccctgaccaaccagccaaatcatcggccacagcctatgaatcattaaacaatcacacttctagccacttctccttccaagcaaagtgcacaaccaggtgcattcctcaaagttctgcccactgagaggctttcccttcactgctgtccctcagggatgtcccagagaggggctgcagtgctgcagctgcccactttcaggtggtgcctgcatatggtgcagaaccatctgtgaaccaggctcaagtcttatcttcctgtgtgatcctatggaactgcccaggaggccacaggtgcaggctgggagagagaaggcagcatagcaggagtggtgaccataggcattttaggccacttcctcatgtaacttactggtgccttcgggacctgctctaacccgatcatgtgtccacccttccatttggtcatggaatgctgctgtgcacgcccagctttatgcttggtgggtcagataacaccagttcacagtgggcagctctagttgcatggtaattggtggctcatggtcaagcatttagtctctaccaaggcccagtggcagaccaagaactatctctcagaaagagagcagttgtccttggaagacagcagaggcttgctccaaaatcctaaagacctgcgcggtgatccacctgccaaaggccccacgtagcatccctgtctgtcctaaagacctgcgcggtgatccacctgccagaggccccacgtagcatccctgtctgtcctaaagacctgcgcggtgatccacctgccagaggccccacgtagcatccctgtctgtcctaaagacctgcgcggtgatccacctgccagaggccccacgtagcatccctgtctgtcctaaagacctgcgcggtgatccacctgccagaggccccacgtagcatccctgtctgtcctaaagacctgcgcggtgatccacctgccagaggccccacgtagcatccctgtctgccacaatagtgcctcaggcaccactggatctcctgggtcatgtggcccaagtggtagagcatctttcacagcagcctggacctgttgcagagcctttttttgttctaggtcctactcaaaactatcaattttgggggtcacttaataaataggccaaattaatacacccatctgaggaggatgttgtctctaaaaattcaaagagccccactcacctttttaactctggctataggaggggctagacgtaaccactttttctccaccttacgagggatgtctcagtgtgcccccacaccaccaaacccctagaaatttcactgaggtagaaggcctttgaattttaattcaatttatttcccatcctctgacatgcaggtgtcttaccaacaaatctagagtagttgctgcttcttgctcactaggtccagtcagcacaaggccatcaatgtcatgggccatctcgtatgacatcttgaggaaggcaaaggtgatcaccatccctgcaaactattttgtgacacagagttggagaattgatctacccctgagtttcattgctggccttgcctgctgaaagcaaactgcttcagtctttactaacaaaaaaagcatttgccgaattaatcactgcatatcagataccaagaggtgtggtggattaatttgcttaaacaacgaaaccatactggtatggcatctgcagttggagtcaccacctggttaagcttatgataatcctctgtcattctccatgatccatctctcttctgcaccggccaaacaggagagttgaatagggatgtggtgagaatcaccacccctgtatccttcaagtctttgatggtggcactaatctctgcagtacctctaggaatgcatattgcttttattttaccattttctgaaatagaggcaggttagtggcttccactggcctttcttgcataacagccctctctccacaggtcaggaaaccaatgtgaggattctgcctgctgctgagtacgtctaggctaatgatgcatttcagaactggagaaaacccacaggatgggttcagggccatacttgaactgttgtgagaaggacatgagataaaactccactgatcacctgtgctccataagcccgtccctgactggcagaccatagtgacatttggctctcgtcaacttagggtcagttcagatccagtgtccagctgtccctgaaaagtctgattattttctttcccctaatgcgcagtcaccctgttaaggtagatccctttggggaagcctgggagaaagattaacagtgtaagattttggtatggccctggggtctttcctcaagaagacctaacctgtaaattcaagggattctgagtctgtaaagtagctcaagcctgggaattgattgaagggttgtgactctgttttgtgattcaagttatacttctgttcactagacctagaactcttctgtttacacagctcaagtaagaatttagtagacagcccatctatttctcttccaggaatataatggactgccagttgccagttgattactgccttgactgtgctgtctgttttggtaacttgtctcacggtattaccacctggtcggccttgtctttggtaattatgtgccaccatgtgggccctgccccccttgctctgggacccagtcacttccaggtttcccagttccatggccatagttcccactgtaaggtccggcctgtggagaagtgtgactccagagcttttcaagggtgcgaggactcccctcacacatctgtttctcatagtcgtggtgaaaggcgtgtcctctggaccctcctggggtgggaggaaatattagttacttccaatttctgattattgtgcaacttggtaacaaacagggactctggaagcaatggggaagaagccatcagaccctgaggctcacaaaagaggagatgttcatgtttgtttccgctgcagtcaagctacccaaagtttttaacaccttggagagacctggctgcaaatgtttgttttaggaacatgctaagaccatggagaatgatgcctctgtgacatggagagatgcaagggaattgtccctcagtggaggcccctttctccctgtcacaactgattccctcagctgggctttgaggactctgccagaggtggtatagacagggtaggggtgaacatttagagtcttctcttagaaagaggcacccgtacaaagtgtgcctggcaagaggtcaccaggagaggaaggatagaccctcgctcgggagggtccccaattcacagaacatagctctagaaaggagaacagatggcatctgtgctggtagacctgccagcccccacactgccagcaggccgggctgcagcatttttacaggggatcattcagtttcttctaaaatacttccagggacaagagctcaccacttaatgagggggcttgttttatggctggactgacctattaaaagattcatcctcttgtcgggcaaaatctacagagtctacacacacagatacacatccacacacaaatatacacacattcatacatatacatacacatgtacaacatgaactcacgtacaatgtgaacacatacaaataacattcacatgcaataagcatatttatgtatatacatctacatgaatacataacaaaaatacacatacaaacatgactacatgtacacacattcgcgtacatataaaatacatgtgcacacatgtaaacatctgtacacatatacagatgcatacacaaatacatacatgcatacatagccttgcatacatacacatcctgcagagttgatccacttctgccaattctgctccctcacaatcgatttcctcttctaaaaatagcccttctgatattggaagtcatccttccaagactttttttaaagagactttattttttagaacaaatttaggttcagagaaaaactgagcagaaaatgcagaaagtcctcatatactccctgctcccacacatgcacaatctcttctactatcaatggcctacaccaaagtggtacatgtgtcaggactgatgaacctaccttgacacatcattacccaatgtccatagtttacgttaggatttactcttggtgttgtccaaaatctatggattttgacaaatgtataatgacatgtgtccagcattatagtatcatacaggatagtttgactgccctaaaaatcctctgtgctctgcctgttgatcactctttcacatctaactcctggcaaccactgacctttttactgccttcatagatttgccttttctagattgttatacaattggaatcatacacaatgttgtagcctttttgcattggcttattttatttagtgatgtgcatttacgtttcctccatgtcttctcatagattagtagctcagttctttttagcactgaataatattccattgtccagatgtaccacagtttatttatccatttacttaccaaaggacatcttagttgcttctcagttttggcagttatgaatacagccgctataaacatcttgtgtgggtttttatatggacataaattcggataaataccaagaaaggagattttaggagtatgtaagagtatgtgctgaggtcggtaaaagtacatttagttttgtaagaaactgccaactctcttccaaagtggctgcaccattttgctttcctaccagcaatgaatgagagttctcattgcttcatatcctcaccagcattcagtgttgtcactgttttggattttgccatcctaatagttatgtagtggtctctcattgttattatactttgcagttccctaatgacatctgtattaggccattcttgcactgctataaagaaatacctgagactgggtagtttataaagaaaagaggtttaattggttatggttctgcaggctctacaggaagcatagcagcttttacttctggggagacctcaggaagcttccaatcatggcggaagacaaagagggaacaaagagtctcacatggcaggagcaggagcaagaggggagggaggaggtgctatacacctttaaacaatcaggtctcatgagaactcactcactgtcacagggagggcaccaaggagacggtgttaaaccattcgtgagaaatctgcttccacgaccattcaccaaggatccgtccccacgatccagtcacctcccaccagaccccacctctaacaccggggattacaattcagcatgagctatggtggggacacaggttcaaaccatatcaacatataatgctgagcatcttttcatatgcttatctgctacctgtacatctttttttttttttttttttttttttgagatggagtctcgctccgtcgcccaggctggagtgcagcagtgctatctcggctcactgctgcaacctctgcctcccaggttcaagcgattctcctgcctcagcctcccgagtagctgggactacaggcgcgtgccaccacacccagctaatttttgtatttttagtagagacggggtttcactgtgttagccaggatggtcttgatctcctgacctcgtgacctgcccgcctcggcctcccaaagtgctgggattataggcgtgagtcctgcgcccagcctgtacatcttttttaatgagatgtctgtttagatctttgctgagtttttaattgggttgtttgttttcttataaagttttaagagttctttgtacattttagatataccacagtggtcttttgcaaatattgtctctcagtctgtgacttgttttctcattctcttgacagtatctgtttcagagcacaagttgttaattttcatggagcccaatttattaactatttcatgattgtgtctttggtgttttatctaaaaaggcaccactaagcctaaggtcctctagatttttccatatgttatcttctaggagtttcatagttttgcattttacatttgggtccacaattcattctgagtgtgtgcatttgtgtgtctatatctgtgtgcatgtctatacttgtgcatgtgtgtatctatatgtgtgtatgtctatatgtgtgtatgtgtatgtatatgtgtgcatgtctatacatgtgcatgtgtgtatatgtttgtgtgtatatgtgtgcatgtgtttgtgtatgtgtgtctatatgtgtatgtatgcatgtatgtgtgtgtctatatatctgtgtgcatgtgtgtgtatgtcttcatactctgtgaaagagagaaagaggctgcatatttaaagggttaggctgagaaccctcctgctctgctggtggaaatgtaaaatggcacaactacttgggaaaatggttcagcaattttttaagaagttaaacatgccacctgtcactcagccattccactcctaggagaagcagacacacaggcctacacaaaggctcctgcatgagggatccgtagcagctttatttgtgacagcctcagactggaaatggcccagatgccaatcagctgatgaatgcatgcacagacagtggctcaaccctgcaaaggggcaccacccagcaagaaaaagaaaccagctgctgatacacacagcaatggaagggaagcgcaaaatcggccaagagccagacagaaagcagaatagccactggagggtcccgtgtctataaaactttggaaaatgcacacccatgtttagtgacagaaagcagctcgggggtttcctggggactggaagaagccctggaaggacagcaggactggggggcttgggcccaccgtgagggcagcggcaatgcacatcgcccagatggtggggctgctgcagggggatctgctaagtcaaaacttgtcaaatagatatttttaaaagttaagacagcactttatttttaaaaagaacatcatgtatttttgtgagtatatagattttagagccagaagagaggacgagcatgatttccatatctatttgaggatgagcgtttgaagcagctcctctctgatttaatcccactgggcaccttttgcctgatctgaccgttctgcagtcccctggcagcagtcaggacaggctgcacacgcagaggaacagagccaggctgagcaccctccgccgtcattcacatccctcacagacctcagatgcctgtagccagctgcaccaacaccccagggcgcagtcctgtgaacatgctccacctccatgcgggctgctgggtcagaggcagagagaccctggaggacctcctcagagcggaaaacatttcagcccagaagtgacacacatcacatttgcccacaaagattcccacaactcactaatcaaaactagctagatacggtcatgtgtcacttaaagggaatacgttctgaaaaacgcgtcgtttggtgattttgtcttgtgaacatcacagagtggactcacacaaacctagatggcacagcctgtgacacacctaggctgtgtggtgtagtctctggctcctaggctaaaacctgcacagcatgtgactgtgttgaacaccataggcaactgtaacacagcggcaagtaccgtgtgtctaaatatagctaaacataggaaggggaatgcgttgcactgtgatgttatgacagctgcgacatcagtaggcaacatgaatttttcagtttcattatcatcttataagacccccattgtgatctgtcattgaccaaaacgtccttatgtaacatatcatgctgcttggtcccactggatctcagagagggcaggaagcaaaatgtttccatgcgcctggcaagaagcgagcacaaacgatgaccagtcaggataagaaggaagttaggcccggtgtggtagctcacgcctgtaatcccagcactttgggaggccgaggcaggtggatcatttgaggtcaggagtttgagaccagcctggccaacatggtgaaaccctgtctctattaaaaataaaaaaatgagccaggcatggtggcgggcacctgtaatcccagctactcaggaggctgaggcaggttaatcgcttgagcctgggaggtggagtttgcagtgagccaagatcgcggcagtgcactccagcctgggcaacaaagcaagactctgtctcagaaaaaaaaaaaaaaaaaaaaagttaaattcagagctgcttctcatggtgacgttttcaaccctctacggctttgatactggaactgccttcccagttagtggtggtctcccgggggctactagatgcatgtcaagctcaaggtcttctaaagggctccagccaccagtcttggctcaggaggctgtgggagcagggccaggcatgtaagctgagaacacaggctgtgcagggcctgaggtgtggctttgcaccttgtggcccatgccatgcctttcttctccaccccaagaatgcgggccccctgcagcattccacagcccgtgcttacacagcgtatttcttctgtgcattgtgcgctatcccagaatattcctggatgagtgagaatttatcaggagggaagggcctggatctaacagccctaaagacaccacctcactgtgtcctccactctgtatcctggggtgtgtggcatgcggctgggcccctgtggccctttactagcccccgtgctttgctttggggccagaactgcctgcctggtctgttggttttccatgcatgcatccgctgctctgtcgaggaagggtttgacagtaatgcctgttgtgcaggggtcacactatgtgtgcagtgggatggtcttctgtggcctaatttcatcaaagcacaaaacttaggctgcctagaaaataacagttaatgtgtcctctgtgtgtgacttctcctaggtgggctggcaatgggagctgggccccagtggctcagagtgactgagcactggtcttgtgtacttctgattaaggacaaatccacaagctccagaaacccaacaagcaaatagtaataagtctggcagaacgctgaaaagcttaaccattatgtttttgctgaacaaaagaacccccagatctcatgaagaaaagccagaaaaccgtgcttttcctcagaaggtagatccgaatttttccagccgttggttatgtgtgcagcttggggccaggcgtttgtccactgcaaccacaacctcagacattcttctgtgggggtctgagcctggacagcagtgttctcagagcactttccaggacatgcgagctataagatgaacccatgagcagatacgcttgatcctgcaagctggagttacttagtgttgatcatttcactcttcgtgcgtcctgtctgagggttagctgagcccgttctggtggtgggcaaccacagagctgtcttctggctaatgaagacaaagccaccttctcaactacaaggattccttgtcccttctggggtggctggggtggccctgtctcctcaccaaaggctcctgggacctcactacgtaaagagatgagattactttggaatgacttatttcctcatcaataagtgatgggagttagaaggatgacccacagcacccagcagctctagccacatgtgaaatccatgcttgcatttcgggtagactcctgctccatctggaaaagatcatcttttccagagttttgctggatctcaacaagtccctggaagcgccttgtcaatctttggttctcagaatttgctcttccttattgcacgtctggggagacaccacccacttgagtgtagttgccctctggtcattcacttatttttcatctattgacttaacaaaatatttgtggagcacccactttgggacaagccctggctcagtactctacgtgcagagctgaacaaggcagtctggaggaggacaggcagttacaccaagctccctggactggctctgacagtgccacgcatggggtgcctagaaactgctgtggccggggctggtggaggatgggtcatcacagaaatagcagagccagaggtgcagatgtgcaggaagtagaggcctcggctcagccacccctgttccacaggccacagcttagagagaccctttgcagggaagtcagctcacagcaaacaaagggtgctgacatttcattccttcttcctcatgataagaaatctcttctgttgcctgaggcagagtcagtgtattagtcaattttcacactgctgtaaagaaataccagagactaggctgggtgcggtggctcacgcctgtaatcccagcactttgagaggccgaggagggcagatcacttgaggtcaggagttcgagaccagcccagccaacatggtgaaaccccatctccactaaaaacacaaaaattagttgggtgtgttggcaggtgcctctaatcccagctacttgggaggctgagaatcacttgaacccagggggcagagtttgcaatgagccgagatcgtgccattgcactccagcctgggcgacagactctgtctcaaaaaaaaaaaaaaaaaaaaaaaaagaaattaatacctgagactgagtaatgtataaaggaaagaggtttgattgactctcagtttcagctgggggtgccacaggaaacttacaatcatggcggaaggcaaaggggaagcaagcaccttcttcacaaggcggcaggagagagaagagaaagtgaagggggaagaatcctcataaaaccattggatctcatgagaactcactcactatcacaagaacagcatgggagaaactgcccccgtgatctagtcccctccctccaggtccctctttgacacatggggattacaattctagatgagatttgagtggggacacagagccaaaccatatcagtcagtggcaaaattcatcattggaacagctcatgtaggcccagacactgttgtattccatgggtgaggaggttgctgtccaagccacctgctccaggacacatgctggggcggggtctaagtctctttcttttccactcacccccttgctgtctcagcctcacatacctaataagacggtcccaagagcttagccataggagatagactaatgcacagtcctggatagcttgtcctgcctttttgcatggggcacgtcttgttaaactttttccacactctatttgctgagactatgcagacacagggagagcagatgcctggcagttctctagaaggcaggggctgtgtgaacagcagttcatgtaacttggtctgaagcaggccattttcctccatggttatattgccaattcagggagaagcagagtcctgggccccctgcactgtgtggccctgtagcacagtgtgcacctggattctgacatctcagcttctttcaaattcccatccttttctaattattaattagattgttaattattattaattagttaatatgattaacaaccacctgtgacctcatggtagcagctccttatagaaatgtaggagcagtccccagttaaaaattagatagggataaaagcccaaatcagggcacttattcagggaggtgccacctggccagggtctgggctgctccaggaagacggtggcaggagaggacccggccaggggcctcccgggccctcctcacctgcactctcggtggtctcgggccggtgtgcatgcagggtgtcctggaagcaatcttccttaagaagcacagaaagaggaaatccaaaccatcctgcagagcttgcggggcttcccgacggggcttcccgtcagggcttggcaagctggcagccatcaggaaggacttgtggaaagaagagctttgatttacggttgctgcctcagaaaccccgatccaattgatgaaccgacctgcggctgccttctggttggatgaagtgatttccatccatctgtttcatttaaaaacaaaattcaggaagtgagcttgccatacctgactaaataatagtgtgtttaatttttcctgtttcattccagacatccttcagaaggaggccagattttacagagatttcatctgaatgcattccatttgatctaataatttatggctgtgttgtatttgtcctacagaaagccagccagacgcccgttggaaatccaacacacagcaaagttatcctaatggacagggtcgtgacacactcagacatatcccagggcagacagccctgctccagcctcttatttctgtctgtcctacctttggcctaatctcctttgaagcaattttaaatgaatgaatgtggtgctataaattctacccgactcgtggggcctttcctaccttagtgaaaagataatgtgttggctgagatggcaaggagacagggtcacatggtgttgcagcctttcagatgcgagtcccaagaatctaaagagaactgacagcctggcatttaatcgcccctcatttaacagcattaactcaagttaactcttgcaaagctctgtgatggattttcccagggaagcggcttcctgcctagacatacgagcgcctcacacaggcctgggctggccccattcgacgcctgggcaccactgggagcctggagctggggttgggccctgcagagccagagcctcttggccatgggcagctgtgcctgggcttgtggctggttaccaagcacaagttgacatcgtgttcagaatagggcgtgctctgaggcccccatcagcatttggcaccaaattgggacaaatacaatgaggtctgagcccctattttatttggggaggctgtgggggatgtaaaatagcagatataggtgataaagaaggcctgagcaacagagccatgccagggttagagcgacagagaggagagagaaataaaccctctgtaactgctcatctgggattcaaagaagatggtttctgaatgggacctaaagcacaaacaaggttcaagggggagggatgagggagcatatgtgtcctaggtggagggaggaagcagcgtgccatgtcctgctgccgtgcccagctcactcagccacccacccaccccacccactcctgcctgcctcaggctacctcctcccctgtaacactgagcctgagaggcctctgagccccccgtgcacagccagcaccttagccgcaggctgtctcttttttggggtgtccctgaaccgctctccttgtgcccctgaaccgctctccttgtgccccttgatcatcagcagtgctgtcattacccctagggtaatgctgccctcccacaggggcagaaagtctttatagactctgtcctggaaggtgctggaggccaatgaggttatgacaggggctttgatgctggagactttctgtgcctctgtgtggcctcctcacctttggtttgggggttcgtggcttccatttgatgcacagtctgggccgggctgaggaaggtggcaggtgttcagaagacgcaggtggccagggaagcttggccgcacctgcgtaagagcacacacctgtgtgtgggcaggtgtaagccatgcagtggctctctagggaggtgggtgtgggcacatttgtctgcagcagtccttttagcagtgggagaaagagctgaagttttgagccggacagttagttatgtgtcaggctgtttgagaggagaaacccctgtgggtttctgtgagccatttgggctgtaagtgtgagctagctgcgtctaacaaagctctccccctaacagagaaggaggggctgtttccactgtggatgcagctcgctactgatgggaacctaggtggtccagagcaggccatgatccctggggacaggcggcagcagtgggaggccctcagttggcctgaggctgggattacagtccgaaccgcacggggcttatagccatgggcacagtgtccctgcttcagacttacccaggtttgggcagggggggagaacgcaggtgaaattccagaagcttcccgctggtctgccctggacagcatcgggccagccccttacttttctccaaagcatcgcagatacttcaccaccatcacaggaaacagtggggcagagccagatggatccagtgatccgaggccctgcacaccctgggacaggaagcacagcaggactgacagcaagtgcccagggccagtgccctgtgtgcgccaaagtctacactcactcatagtccagcaaccctccagagccagcagggaagggcagcacccctccctgaatcacagacattaaaatagcacctttcagtgttttttgtcttttgttttgtttgggttttttttgtttgtttgtttgtttgtttttttgagacggagtctcgctgtgtcaccaggctggagtgcagtggtgcgatctctgctcactgcaacctccacctcccaggttcgagcgatcctcctgcctcagcctcttgagtggctgggactacaggtgcgcaccaccacgcccagctaattttttgtatttttagtagagacttggtttcaccatgttggctaggatggtcttgatctcttgacctcgtgatccacccgcctcggcctcccaaagtgctaggattacaggcgtgagccaccacgcccggcttcagtattatcttaaatctccgagggctacaggactattgtgtctgccaaatggattcttcatttctccacctcctcatgctccaaagcaaacccacgcaaagtggctaccagtccccctgccttccaggagctgttcagaatttagtacctgcagcttcttgggtcttaaagcaaaagctgggagaggaatgggtcgagaggcagcctggggcgctgaagccacccacctacttctgcctcatacagttggctgtgggtggggacagggacatatgccacagaggctgacacctgccctgtagccagggcttctcaaccttggcactatcagagccagataatcctctgttttgaggactgtgctctgcattgtaggatgtcgagcagcatcccaatttctactttgtggatgccagtagcacgctgctgcaccccagctgtgacagctgaaaatatctccaaatgttgccaaatggctcctcgggggcagaatcaccctggttgaattcctggttcctctgaaacagtgactgagtgtcagcactctggggcctggctgcctctaccttgggctatgctgatattgattaccttaagcaactcatttctctttccacatcttcacgagcttcaccttcatcaacaaaagagccctaggccaaccaaaaacttcctgtggtgaaatttagcttgttggagctgactcttcttgctcagctgaaactgtgcctgctgatgagtaagtcctggagatcggctgtgcccagagttagcagtactgtacggtatgcttagaaacttgtaagagggcagatctcaggttaagtgttcttaccaaactaagaggaaattatttaaaatttgcttattagcacagcaaaggctggagaaggctctataagggataagctgttacctgagtcctccactcagccctgcccccaccaggcctgctagcacccacagcacaaagttctccagacacagtggggttgtgggcacagtaccccaagggggtcaagtgaagatcaaatgagatcatgtatgtgtcagtcctttgacaactgtgcctaaccccaaggggaggtactgggtagcccctgggtgaggtactgagtagcccctaggggaggtactgggtagccccaggggaggtagtagtactcaaatcccatcagactcttcagacagttcatacaaggaggtctagaacccaagatatttggaccttcaggtgaagcctggctctagcatgtcaaaggctaaaagatactggactttcctctaaagctctcgggctctccatgagcctcaaacacatggttatgaagtgattgtgttacaggaaaggggtcccaatccagatcccaagagagggttcttggatctcccgcaagaaagaattcagggtgagtctgtaaagtgaaagcaagtttgttaggaaagtaaaggaatacaagaatagctgttccatagacagcagccctgagggctgctggttgcccttttttatggttgtttcttgatgataagctaaacaaggggtggattattcacacctccccttattaaaccatatcgggtaacttcctgacattgctgtggcatttgtagattgtcatggcgctaatgggagtgtagcagtgaggacaaccagaggtcaccctcatcaccaccttggttttggtgggatttagctagcttctttactccaagctgttttatcagcagggtctttatgatctgtgccttgtgctgaccttctgtgacttagaatgccttaactgtctgggaatgcaccccagtaggtctcagcctcatgttacctagcccctactcaagatggagttgctgtggttcaaacgcctctgacaattggcctgaatgaccgttggcctaggagaactggaaatccttgaagcttactgcactgccccgggttgcacaccctcacgtggtgactgtcaggaactggcccagagtgggggaagtcactccccgttcctgcacaggcacagccttcacgcccaaagaccatgccgctccctgccctccatgaaaaaagtgacaggtatatgggcccaccacaatcattcattccccacagccactgtccttggaggctccttcattcttacctccccaacccaacctcaaagtcccgaaacgggcatagagttctcccagctgtgggctgagaggccccctcccgccagacacatgctgaggtgagaccaggagagcctctcccagcaggaagagggcagttaaagggactggggtcacagcgcctgttgtagtcccttgagttgctgtaacaaaatgccacagatgggtgtgtgtgtgtgtgtgtgtgtgtgtgtgttggtgaggggtgtcagcaacaggagtgatttcccacagttttgcgggctggaagtctgagatccagacaccacagattcggtgtctggtgaggactggcttcctggttcatagacggcgccttctcaccgtgtcctcacgtggtcaatagggcaagggagctctcacgacccgatcatctcccagagaccccacctcctaaggctatcacactgggagctggggttgacatgactttggggaacatgtgcattcaagtgcagcagccccacacccttggcatggacctgcaggaaagatcctgccctgcctttgctggagggttcccgcaagggcctcctcctcacctctccccactgctcatgaaatattactggaatgattagaaagctgagagagaccctggggaggaggtccctgagtgtcccatccaccacagtgaagaaggggccctgccaagggctttgagctctgcagccggagaggagctgcctgattggaggccgcctttggggcaggcgattctagtgcattctatgacctaacggccttgttaagtttcacacttcacgctggctcccagtgtatttttcattccttctctctctcagttcccataaagccgtctagctgtccctgtgatacattcaaacttgcactgtttggattccctaggctgtctgaaaatgtgtcctttgagtaaaatccttctccctcaattcccagttacgtctttaaatcaagatgggccctccagtctctaaacaccccatcagtgtgagatggcaccttgtttgcttttaagacctgcgatttggtttgaatgtattcagttatctagatgtcttcatgctttccatgaaaatgtactgaggttcagtccttggcatttttccttgcagaattcttctctattatttggatgtctggtatccctacaattatacatgcttccaacatttctgtcaacttttcctaagaagtttgttggaatgcgctttcatttttccatcccacacttgtttatcaaaaatacggtgtggtggggaagggagagagggggagagtctgagctcgtaggtaagatcttcttgctcagaggccatgcgacgggcttatcatacaggttgggtctagccctgggaagctcatgacaggtgagaatgaaacccgctccagttacttttgctgcataacaaatcatctcaaaactcagtggcttaaaaccatagtttctttgtgaaactcagggatgctgtgggttgggaattggggcagggcatgacaggaaggctgtctcttgtccaccatgtttaggccttagctgagagaacctgcaggtttcgagatttgctggcgggagctgcagcctcctggaggtgggctggcttatgtgtctggcgggtggtgttgactgctggctggaaccttggccgggctgcaggtcagagcaccagcacacacttctcaacgtggacagcatgagcttcctcacaatgtggcgactgggttccgagagtgagtgcacggcctgcccttgaccttgcctcagggtcacgcagtggcatctcccctgagccctgcttgtggaggatgtcacaagaggtctgcccagcacacagggtggggacacggtcctgtgacttagttaggggagtgccaaaggctttttgtagaggggggctagtgagtagagacacagtgttgtggctgtatttagaaaatacaatttgccacatgatctaaggttcacttttagctctgtgacctatcattctttccttgagttcagtaggaacatttcttgtctggcacagctgcctccggtttggtactttttaattaagtgcgaaaataagttccaccgtatctgttctccctggggtgtcgggatgtccagcttccaccggcctcatgggcagaggaagcagcagccagggcagggccaggtgtgcccgtacaggactggcagcccaaggcaaggggtcagggctctactcccacagacagagccctgcacttttgtctcctcatttttaaaaaatgaattaaatgatcattttcttaatgttagaaaggagggaatgaacccccttgtgaacctgctaaaagccaattatccacactgctcttaactttgcaattctacgggtttcgcagacccccaaaaccatccacagaccactgatgaagaccccgggactcactgccctcagagccttcatacggcagcacctaacccacctgcagcacgaggatctccctggagctcttgctccagcccagcccggttttgctgacagcccctctgcagcccagtggtatgcaggtgacatgtcccctgaggccacgcgtcatcacagcctgagggaagcagtggtttcaaccctgctgtgggttgaggacaattgtctagaggaaaggaccccatcctggcacttctcctttagctgagaggtgatactttcttttccaacatagtgagaaagcaacacttgcatatcaaccacattaagacatctgctttcagaaaagaaggcgttgtgcccaacatctgcatggcaccaaacatctgtactgtagccttgttgatgaccagagcaggcaaggcggcatctcccaggtgcccagcacttgagccccatgtttgatccccacagccaccctctatgacaggtgctgtcgctatccccagtttacagatgggagaactgaacagaagacataaggcatttgttcaagggtgcatggctggtgagtagtgaagccagctaagatggccatgaggctgagaaaaagagagtaataaggagaggagtccagatgccagcccctgttagtcctgagggtgccaaggtcatagggaggtgacatcagactggctgaattagtgtctcagggggcagccaacacttgtcactcaggaagtctcgcagggtagaggtcatcccgagcagccatggggtgctctctgctgccctgtgggaggaggaggaggaggatggagacgaacaatgctgtactggcatgtggaggggtggagcacactgggtacaggctcctaacctctgtcttggcctcattcccctcctctcctcctggatcccctgggctcacctggctgcttgcctgggcacagggacctgggacattatgacctccggctctctctagctgggacctcatggagggcggttcgctgttctctagcttggagcttggggcatctgtggatggtttgatttgtgtggtttctgtcttaaaagaatgtctagaagaagcggcagataaaaggcctggagctcactggagagttgggtttgagatacttcagccatggaagggagaactgaagagccaagctgtgtcattgcttcaggcaagaggacaccgatagggaaacagagggacaggcagcctgagggcatttctcacctgctgctgccaaaaagaatctgacagctgttcagaaaggcaggagaagaaaccctaagacgtgtcaagaaatccatgagaggggaacatctcaatggagaggtgagggggaggccggggccctgcagacgtcaggttgggtggcgagggtccccccacacaggtctctctgtgctcaagctccagtcaccatgctgtcaccacagttgctgtgtctgctggcagctggagggtgcacctgtgccttccactcagcaaactgagtttgagcaaatacggaaaaacaagtttattgcggctatgcttctggcagcgttcctgcccacaggccagagactggtgtatttcctccagtttggagcttctggtatgttctcggtgactggtcaaggctgggctatttcaggacttggagaacctcctcggcctgttattgctcgggaagtttccagaaggctgtagatgcgtagctggctgtccagtcccattgcatcttccctcttgagcaaatagctaaacgtgcgcttcatccctccactcaggctgtgctaataggaaaccaaagcggccaaggggctggacatgtggatggagggctctgcctcgcagcacctccaaaacagttgccacttacagagagcacactaagtgcagacgctgtgctgtgtgctctgcaaatgtcactcctcggcctcccctctgcaccgagacaactgctaccatgagaatcctgtcttgaggaagcccagaggggcaaggtgcctgcccaggtcacaaggttgatgagcaattggccaagtcactgttttatcaccacggaatcactgctggagtttggtaatggtcgttgtatgtgaatgcctctgtgctcccctacaaaatgactgaagcagactcagacctcaacggtgcattctagggatgccttccagttactgaatggcgtactggggttatgtgcattgccttgcttaattttcacgataaggcagtagagccacagttaaaatttggcctcagcaagtcccgggttcgaatgcggcttgtgcagcttttgagttgattaccctgtgtctcttgttcagcatctcagagcctgttttttcttcagggctgctttgagaattcagtgaatgaatgtatgggcaagacttaggacagtgcccggctcatagtcagctctcaagaaataggtctcagcatagtaataattatcattatatttagataattatgtagtccgttttacacatgagggaagtggggctaagagcagttcaggaacttgttcaagatcagccaactaataaataccagggacacccagctccatctgttgccaaagctgtcgcagcatcacgcacttcccgcagaacaccgtgctgtggctgtttatcttcttgaagttcctcagggagtcagtctcttttgtttcaggagctccctgacaccgtggtgaacttggccggtcatccaaacccactcccgcgcccagcccggggccatgacccctaagagggggagagcagtgttcattttgctcttcaccatcgttttgagtgctgtaaatggtaataatcctgatgcccagggctcagcttccaagaacaaggatgccctcagctccctgtccctgcctgcacctccggctgcttcctctcctgcaggaggaagggcagggaacaactgcttcaccactgataacagcaagagagcaacacgatgcggcggtcacgtcttccaccaaaaacaagctagagaagcacaatagctcagcacttcactggctgctgcctcccgttccctgctattttcatgaaccaattttctttatcttctgtctttggcaagggcagcatttttgaagatgcatgttaatgtttaaaatacccaatagctggtgcacaatttttctgtttcttttaattatctcgttcactttttcctctgtattcattgtagatcttctattcctctgccctctctaaaaatgcgttgcatatttatattgttataaaccctcctgtgctcttccagtaactgttctcagcataaccagagaggtgccctttccccactaaaattttaacagagcacagcttttaattaccttttccccatctccgacaggaaaatttccgaacataaaataataatcaaaaaacttccaagtataacttgcaacccgagagccagactcaacaaagataagtccccgtttctttcttctgaatatctaaagtttcctgcaagccccagtggtgcctctcacatgtcccaggcctctggccaggttccagcctcactcactgcttgctagatgtcccactggagcgtatgctctcggtgcccagcaagaaaaggtgctcccttctctgagccaggcctccccgcaagaccttggcaccttccgcctgttttcctgactgcctgtgggttgaggtggcatatgagaactacttgactgtcttttaaaactcatgttgcttcctttgacttcctatctgctgtgtcggccaaaatactgttattcaacagattgctagagggtgggaattggcatagagtttggtataaagtcaaggctggacacacaaaggagtccctggccatgcaggcacagagcacattcttgtggctgtcacccagctgtgccacatgaggtcacagtccttcgacctgctgtctccatgcctgtcccctccccaggctgcaggcgctggggttgccttccctgtaaactcctcctgtgactgtccccatcagcagccccaccatcccctgcttagctggcttggctcctcagaagcacctctgcagccagggccacatcctgctgactgcatggccttcaagccccccacaacccccgccatccctgtgcctccacctctatctcagctccttggatgctcccagcgtccaccagacaaccccagcctcctcagttggccctagaggcaccaaggtgtgccatcctctggcctttcttttttttttttttttttgagaccgagtctcgctcttgtctcctaggctggagtgcagtggcgtgatcttgtcactgcaacctctgccttctgggttcaagcgattctcctgcctcagcctcccaagtagctgggattacaggcgcttgccaccacgctcagctaattctcatatttttggtagagatggggtttcaccatgttggccaggctggtctcgaactcctgacctgaggtgatccgtccaccttggcctcccaaagtgctgggattacaggcatgagccaccctgcctggtcatcccactgcctttcttacctcaccaggcacctcgacccttggcccatccacactctggcccgcacctgctttttgctagatttacctgttccacacctctgaccactcccttggccacatcactcaccagcccaggccttttcattatccctatatcagcccagctcttgaggcccgccccctcctgtggagttacctcctgccctatcagctaatcaacagcaaagcttccctggtccatcatatctagtaccattgtttcaaaacaacattgcaactttctcctttttatttttcccctcttaaattaaaaagaaactcacaagtgatgcaataaatcaaataacagaaaagggtataacaaaactgaagtactgccctgtctccctctgaccctgcctgccctgagacctggtatcaacagtcgaggccctgtttatttctgtgctttcctgggactgtctgcaggtgctcccaggcctctgaggatccacttgtgtctgaacatctctacccagtgacaactatctccccagtctcaggtcacaaaaacatctttgtgtgtacctggtggagttaaagtgtacgattgtgttcaatcctttattcccaaagctggtgagtttttacctccccttctggtgctgaaaatagtacgtaacccatcagcgtgtgcagcgcagcatgtgcagggttctgcagattgaggttctcatgggttatcatggctaactttgcaaattgagtccctttctatctgcttcccatggtacctgacccagcgtttggtgtgtgcccaaccaatgcaaactgatcttaaatattgcctgaggcaaagagaattaagacgggaaatctgtttgaaagaagtggtgggacagccacctgtctccacatggcttaatcaagaaggtaactgaataaatgtgcacttacgggtcacatgtacaggtttacttcattttcatgaaatgacttgtatctctgtttaatgttgctttttgcaaatcaaattgtattccctttggctccttaaaatttcagagacaattttccataacttttaattgacctttaactggcactgaatcttaatttaagctttcaattgcttttgccaagtttttatactaatgttctactaaacagttaaggcccctagaggagcccccatcttaatcataacaaaaaaatctattactttaccatttgtataatgttttatagttttcctgtatagagtgtagtatgaataaacgccttcaaaattctcctttttaaatatcagatttctagatgattctttaaagtggagtaccacttgatttcaggcttcaggctgtgtgtgtgactgtgagtgtgtaagcacacaaacacacatggctttttctggatataactcataagctctcccttctgtaacatgtcagtgttccgtgcctgggcacagggatgctttcacacctagatcttgagagccagggctgcagcacagcctcatcgcaagcctccagtccctggccctccctggcccttgatctcctacacacctaccagcacctggcttctcaccttctgtctgggaaggtgggggctcacctggagccagccagacagctcaggtccacagaatcagtgtgtgcgctccagccagaagtccagcactgtagggccctgctttcaacccatgtgtgtccctggctgggggcactgagtaggtgttagtaaccctcaataacctttcttcaccttcccaaggagctgaccccttctctgtgtcttgacattactctttgtcgtctggaaatcacttaccgagttgcatgacgaccattggcttctgattgatcacttcctatgttctgtatcagaatcattttttggtcctcatttcagacccacagaagcaaaatctttgggggtggggcccacattttacattttgtggaactccctgattgtttctttgtatacagagttggagagctgagagaccctcagtggttcgggtgctctcccaaggcaaggcaggtggaggtcttggataggaatctcattttatttatttgacaaaaatatattgggaactaactaggtcctaggtatttcgtaaactatttaatattcagagatgagtaaacacattataaaaacagcaacataatcaccagatattgatgagatgcattagtcctttaaaagcgctcctatagctgtcatctcagcagctcagcgaggcagatggtacccttccaaaggtgcagaaacaaaacgcaggtggtggggatgcagagccgggccttcaccacacctgcagagtttgcacccagcagtgtggttggcgcaggatgtgttagaggaaggggagggggaagctgggcaggctgagggcactgggtggtggggagggccttccagaagagagacatcccagcagggcgacagcagcccatcacttccatggaggaaggaccagtgcacctttctcggcagatctgtctcccgcccaggccaggatgtttcagagcaaacgagacgttttgttcctaacagatccggctgtttggttttctccctgtgaggctgaactgattggagcctggccatccagaagggtcattggaatggaaagtgatccccccaacagagaggagtgcaggccacagatggaaacagcagagtgctagggggaacgtttgcagaagaaggcagtcaggaaaacgtaacagggatgccaaatccacatcccactgggctcctgaacattgcttgcttactcccagtcccaggagaaacccagcaaatccatctttccttaacataatctttcagcccagatcagccctaaattgtgtcctctaaaacctcttctcctcccacggtgttgtcccccaaatcagtctatgagcctctccccgagtacatgccaactgtccattggctattctttcctgcctcacacgggacgaccaccagggaagtgcctagaccgtctacctccatattccatggattccgtgagcatgacgattgttagtactgggaattccacagcgattggtaataactgatgcttaaggcattagcagaattctgtcctggaaggcggacgttttggagagggttttctagccatgacatcagcgtttttccaagttaattaagtgtttagtttatttaatcctggagaattgagacaggaaaattatccatcacatttacgcaccccaccctttccaaagcagacagctaaggttgggcctgactgcatatactctcagcagctgggcagtgaggcagcagggcctcagcgtctccagctccaccataccccacgtccaggcccacagggcccaaggtgccctgggagcaagaatctgcccaccgagtccctctctactcaggggccagaagggctctccccgacgggcccaagagccctcagctggactcagttcattcagcaaacaagtgttgaatgcctgttgtgttctcagcaccgtgctaggcgctggtggggatactgcagtgaacaaaacaaacacgacccctgtacttccaaagctttgattctagaggggagcctagacggggatgaacagccaccaggccccttcatggtgaagaggaaacagaagtgggcagagaaaggctaattccttttcctttggacaacgcaaggccacccaggtctcctgcctgccaggaggggaggagcggccagcagccccagagcctgcagagtgggctccgccgggacacctggggcaggcctggcttctgtccccgcatcctggcctgctgtccttgtgacctagggatcccagccttagcactgatgacatttgaggccagataaccctgccatggggggttcccttgcattggagtatgtttaccaacatccctgggatctgcccaccagatgccagcagcacccctgagttgtgacagcccagatgtcttcagacattgccacctgtcccctggaggcaaggtcaccctctcatcaagaactcttgctgtgggttcaggcctcctggggagccagttcccaccccaggtactgcagttctttccttcctggcctgcggaggggctgacgggcccagctgcagggtctcccatccccaggccttatgccctgcctacatcgtggcctgaacaagcctcctcactccctgcccccaggcaccccactcagatcccagggttctgcccccgacccctcacggtttcttcttttcctttctagtttctacccaagcagttcccgatgtgtgttcctgggaacactctccctcaagttgtgccgccaacaagagttctctgagaactagactcgggaaacaccacactttgagctgccagcacatgaagggctgcaacgaaatccatgtctaactgattgctctaggctgtttcctattgctcacaacctccagggcctggcacggtgcacaagaccttcaggaagttattggagggagagtgaggcagaggggagataggccgggaggctgcaagcccagtagcggagtcaggtatctggatccccgtgctgcatggctcagagctgggccgcctcttcctcctgaaatcacccagaactccccatggactgtcagtacagagcctgaaagcaggaacagctgacctccaggatgagtccagccttggaggaaacacattgagaaaagtggggagcgaaggccgagactcaggcagtggagttggaggctgggatccacacttgcccagggcacaccttcattatatctctttccctctctattgcataagcagcagtgcctggggcacaggctctgaatgcagtgggattaatgaatacagtggaacaaatgctggtcaccaagggtgatggggatggtccctttagacaccttatcgggtggagacccttcaccgggcactaagcagtatcccacagccacaggcccccagaccctggtacagctgcaacaacaatccaggcatgtggcctggggggacttggctggggccggagcagttgtgctcttagacaaccagaccccagcgtggcttgggcctcacggaaagtcccatcaggaaccgtgtcacctgtcctacaaagtccacttagaagagctgggggaggagaaagcagatgacattgactgctggttcctctacacagacaatgacgttgccaggcttggccagggtcccgtgacagagagggctgtgttgtcggggatggcccgtcagcagcatccttctctgagaatggcatcactggcctgccctgggggcctcggggcctattttggacatttctgctagattttggaagagaaaggaaaacaagtgtcggacaaggttttttttggcggggggtgggcgggggggacggagtctcgctctgtcacccaggctggagtgcagtggcgcaatctcagctcactgcaacctccacctcctgggttcaagctattctcccacctcaggctcctgagtatctgggattacaggcaagtgccaccacactcagctaatttttgtatttttagtagagacagggtttcaccatgttggccaggctggtctcgaactcctgacctcaagtgatctgcccaccttggcctcccaaattgctgagattacaggcatgagccaccgtgcccagcctggatgagctcttggtcttagctttgttttcctcctctgagccactttacaaggttatctttaaagtttcctgatggaaccattctccatgggtctctcacccttctacccatcttacaactgagatgccatctgctggcctatcttttcaagatgtccatgtaggcaccagccttggaaaatagaaataatgtcagtcttcaaagcaaagagcaggcatgcttactgcttgactccggagcagagggccagcatcctcacagtccagtagagaggatttggtgtcccgaagctccaggtcctctgctttaacacagcctggtgtgcctgcaagcgtcacctggccctcactggttcacccgtgggaactggggttcagggaactggtgcaagaaaatgctggtactctggctactgctgttgctgtgagtggtaaagtcttttgtctgaaaaaataagaaatttaaaaataaagttccacataggaagatgcattcccctctctctgacagcaagggcattgggaagcattcacctgtttggtttccatcttgtgtgtctccccagaaagagaagaagagtgggctcctgaagcttctagccggagcatccaccaagaagaagtcacgctccccgccatctgtgtctccaacccacgacccccaggtggccgtggacgccctgctccaaggtgcagtgggccccgaagtgtcctcactgtccatccacggcagggcagggtcctgccccatagagagcgagatgcagggtgccatggggatggagcctctgcacaggaaggcaggctccttggatctaaacttcacatctccttcccggcaagctccgctgtccatggctgccatccgccccgagcccaagctgttgcccagagagaggtaagtgcaggggcttgtctgctctgtggcatgctgtggtttggcctctgaggtctggagccaccttcggggagcagggacactgtggccttgctgggattaggtttaccagatgtacctcaacacccagatccacatggtcccgagcttgggtggtgagtgctggatgaaacgagtctgggaactggagtgttatttcatgttctgcatccatctgattcctgagtttgggattgcaaaggagccatcaggaaatgtgtcaggaccaagtgtttctgagtgcaaatagtgggagactaggcagtgagtggtctgtgccccctcaaccctgggggatcctggagcaggcccctgggctgagtccccagtgggcctatgtgtcccactcagggagcagctcttccctcgcaagcctcaacccactcggcgtcttagaattgtgatgttactcaagacggcttcaagtctatatcccttgaattatcatggcttcaagggtatatagtccgtcagactgaaccctttgaaattgcccatattcattcatttcgatgcttactagcaacttcacatagttcagcctaggtttttaccgatctggaaactgagtctggttgaggcaacatggcccactaaggctgtgggctgtggggctgcaggtgcttgggtttcacctggggctagaggcgtacctggcttggatccccctgtgtgagttatccatcctaaaagggctctcaggtaaaagctggaggcatcacagagagatacgatggctgtcaggttaggatggtagaaagatatgatccttactgagtgcctacacattgtaacattgctgaaataataaaacacaaacaacctcccaaaaagacagtcctggtgtttctgccagaacctttcctcccttggccgttcgggtgcctgcaacccgggaaggcagcctctgccctgaacacctgctgccctcccagacgccattcccagtgccaggtggggaatgagacggggtctatctagatcagaggtctagttttctatcctcacatattcttctgtatagttttctagcttcacaggttcttcgtcaagggccagatggtaaacactgcagatgttgcagtcctgctgtgtctgtggtgaccacgtcctctgccttcacggtggaagcgtggccacacactgtatgtagatgaatgggccggtgtcccagtaaacccctacttgtggacactgaaatttaaatttcgtacaattttcgtaggtcatgaaatagtcttctgatttctttttcaaccatttcaaaatgtgacaacattcacagctctaagactacacaaattagccgcaggcgcagtttgccagccctgacagagatgatgcctagcgccaagcctatggggctaggcctggggctccagagtggacagggctctctgcagaacccgcagctactgacttctgctaaccagtgagaacggaagtcgcatgtacacctgctgttagcatcacaagagctgggtgttctgcacaggggtgacgttcagaacactcagcagtgggcatggattccggctacgcatgcccaggacagccaggccctgccttctatgtttccccaagcgctacatgtgtgtagtctcagtgaaccttcccacgaaccctatgaaatcagttatcctcgttttacagatgaggaaaccgaggttttgtaaaaggctaggtaactggcccaagatcacacagctagttagtggccaagccagagattcagctgaggactttctgacctcatggcccacgccctgagctacctctctgtagggtgcgcagtcagcagcacccccagtcctgtgtagtcacagggcctattatcagcttgtggacatcgtgggacatgtcacagctcctccaggggctgcaccattgttgggtcctgcagatcaaacatgcactgcacacacaccaggcaaacacacataacacacagatacacacactatacacaaattgtacatcaagcaaccacataatacaaacacatattcagacacacaacacacacccaccttctctttccttctctcctcctcctccacttcctccacctctcatcctctcctaaggagtctcctccgcatcagaacctcccttcatgggaccaacacctgctgcctgtgttttccggatgggtcctggcccttgtctggagtcacagagttggtctgccggctcgtgagaatgacagactttgggatagttcaaagctgttctcatgtctcccctaggatccttcttccccagacccctcaactttatcttcaaagacatgacttccagacacctcaataaaaagtattgaaagaccctgtttctataaagtcatgggcatctctgatgaattagaaaattcagagactcactcccgttctctgagtgttccatctaatcaggggtcattgtacccagagactctttggtggctccttgcacccaagcactctgtagcactcattaaagagaagtgtttccaaaaaacagcctgaaaccaaactgctcatgagccccagaagtgccccctcccctcaacatggtagccacaggctgcctggtatcctggggagccctagcaggtcggagctgagggcatgactgggaaaatgctgactcctcgggctgggacagcaccagagagcacttggacttgggccctgcagacttgtgagtaaaacttacttccaggcttactttggaggaggagctgctgggctgcgccctgtgcagaggtgagagtccctgcagtggggccagaacactcagctgccaagcactcctggagggcctcaggtgtgcaaggcccacctgtgatcatgaaagtgggaatgcaggcagcagggcagtatgggctgtcagggtcaaggtttccaccccaaaatgccaaggaggaatgggcagtgttgctgcctgcatttcttgggcctttcctgtgcccagactcctccagatctcaaccatctctttcaagactctggaaagagagcgggcgctgctctcctctccactctcagaggaaggacattcaagtagaaggtgctgcagagggagctcctctgagaaaggactaggggagtgtactgtgagcagcaatctggggccgggtcagcgaggctggcaggctcagctgccctgccccagcagctggcaggcagcaggccagtctcgtaagtagacttatgagccaagcccacgagcctggggtgtaagtcacctagagggccatgccccgttccttccaagaggacctcatctttaggtgtctggcatattcttgtcctgcggactatgtgcagagggagctgaatttccagaagttgcttgtggaactcagaatacgggtgtggtcatgggaaatgcaggcagcaaatgcacatggcatcaggttagaaccgtctaatgccccagttccccagctacaccaaccctggtctgttctggtgcagggccaggcaagctgagttctgggaccagcccctcctgcccactggatgcctgcctcctggctcttctgcaccttggcagtatcaagtatcgtagagaggctttgagtagacagacactctgggccacctaccggccatttcatcctgaatatctttcattccttttttttttttttttttttttttttttttttgagacaaagtctcactctgtctgctggagtgtgcagcggtgcaatcttggcccactgcaacctccgcctcccagatttaagcaattcttgtgcccagcttcccaagtagctgggattgattacaggcgtccactgacatgcctggctgatttttgtatttttagtagagacggggtttcgccatgttagccaggctggtctcaaactcatggccacaagtgatccgcccacctcggattcccagagtgctgggcgtgaggcgtgagccactgcacctggccccctttcttcatttttatagtcctagtttccacatacataaaatggggataataatacatgtctgggtataatacttgtaaatcacctagattaacaccagaaaaagtatgagtgcacactaaacacaacaataataatatatgctattgtgtccagagttggttcctggtgggttcgtggtctcactgacttcaagaattgagccacagaccttcgcggtgaagagcaaaggacaaagcttccacatggaaggggacccaccgggttgccctggggtggccagcttttattcccttatttgtcccctcccatgttctgtttttgtcctatcagaacgcccttttttccatcctccctgtgattggctacttttaggatcctgctgattggtgcattttacagagtgcggattggtgcattttacagagtgctgattggcgcgttttacagagcactaattgctgcattttataatcctcttgctagctacagagcgctgattggtgcattttacagagtgctgattggtgcattttacaatcctcttgctagctacagagtgctgattggtgcattttacactcctagctgcagtgctgattggtgcattttacaatcctctcataagaaagaaaagttctccaagtccccactcgacccaggaagtccagctggcttcacctttcactatgacctctctaatagtaacatatgctgtgacatctatgataatagtaagtcagtgagggtgagggcacctgcagcacggcctggccgactcctgcccctttgacctgcttctccccagatgttcacatcggatcagctcatcctcagctcttgatggcctgtgagttatatggctttgttaggatttcagcgttccttgatctgatccattatgtgtgtggtgagcagaataatggcccccaaagatgtctatgccctaaaccctaaaaactcatgactatgttaccatacatggcaaagagaaatcaggttgcagatggaattaaagttgctaaccagctgactttaaaataaagagattacccgggattatccaggtgggccctgtgtaatcacaaagggtccttatgagtagaagagagaggcagaggagaaggtcagagtggcatgatgtgagcactcccctttgaagatggaggaagaagcctccagagaagggatgaaggcagcttctagcaactggaaaggcaaggaaacagcttctaccctagagcctgcaggaggaaccagccttgcagatgccttgattttggcccagtgagaccacgttggagttctgatggacggaactataatatatttttatagtatgatgccactacatttatggtcattcgttatagccataaacaactaatatgtgtgttgatattacagtttagtgtccagggtatagaagtattcttatccccaagttcctagcagacaccactctgttaccagcacattccatggactcaggggctcattcgtcttcctgtgttggagcaagtgctctgaaaaggctaccacatggagggccactttgcagactctgttgtcagggagggaagcagacgacccccaaggaaagcagaacatccaaacctcgcacacagagctaatggtaataataatggaatgagaattcattctgattttgcccatttggattccttgagccctgtgtctgaaaattagctgtggttgccataaccttaattatactcagcagggcagagttgcttgctgatttatgacgcacagttgtgacctgggagtagctgtcatcctcagctgctgacacggacacgacaacggcgctctgtgtctataacggggagtatcaattactttcctgcagcaggaagaacagctcagagtcttggaatgatctggacagaaacgttaaacacttgtctcgtataaattcagcccacatccatctgggctcattaaatcattgaattgctcagaagcaccaaattacatctttctaacaaattatatttttaaagctgcttgtttatttcacatctggaagttgaggcaaaagccaaaacttgcattcaaagtctgagaaatcatctcgccctttgccttcctttctttccttggggaagagagaggaggagcaggtgtttggaagaggtggaggatggcagaaggccacaggtaggatggcgctgatcctgtgggccctcgcagcctcagtttgtgtgtatgctgtctgatttcacagaccgctggctgcatcccggcagccatctgtcctccttgaaggagggccagcaggaagccctcacagagacgctgagctgggaggaaggaggtgcctccgcctgccctccttccttcccgcctgcatgtccctgagagcagagtctggttcgccggcagatagcccatgggaaccagtccaaccatcgtgcacccgtagatgctctgagacacttagagttggctggtattcgggactgcgacccagaacctggcctgttctgcttccccaggagtaggaacactgcacccccaagtcagcctcaggagcccatcctccatgcctcctcctcttgccagcctggtgcaagctgggcctgtgtgcccaggggctgtgcactccataggactgggccttggtctcctgtctgcacatttttcctgagcctggcaccaagccaaactgccccaaagccatggcttctgcgccccaggctctgtgaacacgtggggtggggaagggcaaaggcttcctccctgagcatgcactcagctcgattttcagacaccaatgtgcaagcattccctcccagagctgctgaaaatccacattccctagttcattccccctaagtagtatcaagtaggtccaggatgggcccagggaactgtggggggtcctgaagtatgtgagccacacttggagcaggtgtgcagtaatccctgtggcgatggggcttgcagactggtgcaggaggcaggatgggttgggtaaacaggtgaatggctgggcagtggaagatggtaagagctgggaaagggcaggcccggcgtggccacacagggaagggcgttctgggcagagggagcagcatatggaggagccctgaggtgggtgcacctggggtcgctagggcgcggcagggcagagctggtggagtgggaagggcgcagtgtggagggcctgggaatgctggggcgtttagactgtggcccctcctctgagagggatggggactgctggagccctctgagcctttgcccaaaaggagcctcagctgtgaggcaactcagtccaagcagggtgaaagcaggaggcccagagtgggcagccgccaggaccaggagccacccacaggagacctgcacggaggccaccagggaaggcatccagagccgcgggggccgtgtctcctagacagcctcggcgtctgtggagatgggtacccgggcagtccagtgctggttattgagtgccttcgccctgccaggcccatctcggtgctgctcagcaaagtgggtgtctgagggaccgtcagccaggggtttttaggcagagagaatagctgcaccctgcctgccacaaaatccaccacatgtgggatctgggctttagatgtgcggtccaacaccctggtggcccaggggcatcttctctcagcccttactgcacaatcctcacccacaaaagggctgggggtgcaggggcccagccaggcttcgggcaagcatgcccctgtggagtttccccagggcagagggaggcccagctagtgggagtggggatggggccctgcctgtcagactctaagcataagggccgagggcacaaggcccaactggttcgtccttggcagtgttttagaggaaggctctcctggggccaccacagctgcttttcagccttgttcctcctcctctgtggcttgcaggatgggtgtgggatagcagagcaggggggtgtgtgtgtatgtgtgtgtgtgtcctgtcaaacataatcatagccggacactagtgaaagtagtcagacaggttttaatcggcaacataactgacatttgcaatggggaatagggtccaggctgagctgagctcaggttcaattggcacacaagtgactgggggtttccaagagagaatgagggagcagggaggcagcgagtgggggctcaggagagtgggggaagtgaaaagttacagatggtggaagcgggtggtccgtgtgaacacatctggacatgctgacgtgctcactgaagtcaggagacagtgtgtggctgtcctcaggtgtggctggaacccacagtcgattcttttggctgccgtgaggtttctcaggcaggcactttaaaggggactggggtcagcctagggatgccaccttgagctgttagaagctatgttagtggttgttcaagttgttataggcagaggtgaggcccagccaagaagagggctcagaggagccaggctggagtgtggtcgaggagagaactcttggtcagtgccacagctaagtgttgccaggagcacctgccacagcccagagagcccctggggtgcactcagagctccagcacctgccacgcagcacaccccatgcccctgggtccctgcaggcggaggccatgcagggaagaccccagggaaggctcctgtctctgattccacactacagcatattggtctgaagacagggactccaaagaggcctcagaggctgcagggggcccaagtcttgtggaaatgagatgtggggaaagttgggccttattgatgttgatgttgtggcctcagccagttccaatgctaaggcactgggaaaaaaatcttatgatttttggagcacatttaaaaataaggacaggttaggcacggtggctcatgctcgtaatcccagcacttggagagcctgaggccagcggatcacttgcactcaggagttcaagaccagcctgggcaacatagcaagaccccatctctacaaaaaaaaattagaaattggctgggcatggtggtatgtgccttggtcccagctattcgggaggctgaggtgggaggcttacttgagcctgggagctcaaggcttcggtgagctaggatcataccacggcactccagcctgggtggaagagcaagaccctgtctcaaaaaaataaggacaatttacataaacaatgttccaagtacctttcacacatcacattgggccccaacctgtgaggtggtgctgcagttgaggagcgtgcttttcagaggaacctgcagagggagaggtgaggacacgagcccagggtcttgacactgggatggggcaaatggggacacagtttttcctgaccctcccccgcccctgcccctgggaggccgcagtctaggtgggtgggccagggcaggagcgtggatatgagatggggggctgtgcttgggtggagaatcttcaagggagtgaaacagtccagcttcttcgtagatcagcgtctaaaaggacagcagggggaaatgccttttaaattttttttattaaaaaatgaaaaatttccagagttttgaaaaaattaaaaataaagataaatagaaattgtataaagtgggaaaatagcagcaaataacaataatttacaccgagggaagaagagaaagcacgacccagcagatggagattgtctgtgtggggctcacccactgtgctgtttccccaggtaccgcgtggtggtctcgtacccaccccagagtgaggcggagatcgagctgaaggaaggcgacatcgtctttgtgcacaagaagcgtgaggacggctggtacaaggggaccctgcagcggaacggccgcacaggcctcttcccgggcagcttcgtcgagagcttctgagaactggtgctccctgcacccagctcacagagggggaggccgcctgggaagctccacggcacacagagagggagccatggcgccccaagggttccaggtcatctccaaggcacctggcgggggataccctggcccagggtgggggccagggactgtggaggtcgtgccttctcccaaaacccccaaacggagagcacacctgggatgttcttcaaggaaatgcccaccccctctgtggaaactgcaaagaaagcaccttgaggaagagaggcaggtgccggcgcaggcaggcctgtggctgtggtttgcagccatggcagcgttctcatttaccacctaagcagggttggaggttgcaggaggtctgcaggcgaggtgggtggcatgggggccaggagcgctggagatcatctttctgggctgccctgggcttcccgcggggcccaggttgctctgtcaccattctatatacctcagtcacctgccgcccggctgctcagcaggggtgtttgtgaggccctgggggtgccccggaaggggcaccccaccgcccctgttgggaaccagagcagaatctgtgggcttgtcgcctgccagtagtataagcaacactttctgttcaccaccattgtcccttgcattacttctttcttacagcatatttttaacataaagctgttagactttatatatttctaataggtcagacattgcctatttttcatacatctggtgctgcctttttgtaaaactaataatgacttggttgagcttgaaagaaaagatgtctgaggcgacatcaaaggggcagaatttttatatttcccatatggctttgggagagcgccgagaagccgccatcccgcacctcagcgctggccagtactctgggggctggcggggtggatccattgagggggtcggagggagcttggaagcagccggtttctttaaactcttaccaaaaccccgcgctctgtctagacggtgatgattattattcaagacctggaaacatttcgaggaagggccactataattgtccttttgtgtggcggtagaaggagcacgcaggtcaaccccagccgggaaggcaaaatcttccctttattgcctcagagagaactgcaattagcattctcagaagatgatttcttggtatcaaaatgtgcagtttctacaacagtttagatcaccaccaccatttttcttcttttttaaaaataaataactgctcccatttcaggcagtgcaaaccttcatctgctggagaccagaggtacaaggagatcagggggttgcagcaccgctgcaggcttgcaagatcggggagttgggagggcgagagaggaggaggtgcagctttgatgctgggacctccctgagtggggctgatgaatgtatattcattagcaccatggctcacttcccaggaagactgatcaggagcccttcagggacaattttgttctcaagattcacaccttaggaacacatttttatcacctcaaaattttgatccatcacccctctctccacctatatttttacaaataccattcagacttaaattaagctgaagaaactagcctttggtaacatagggtgtcattggttttcagggatgtaaccaattccagaaatacattcttttgcctggcatgaagactttgaaacacgggccgcttattttcagagttcctgttttgggacgtgacttggctacttgttacttccaggtggtcaccacacggcgggggtcatgcctttccctcccccaagatgataatagatttaatagactcaaagaagttgttcagaatcaaagaagaaaaagtctggcttaaacatagtaacttctgtgtgccaggttaatgacaaccaaaagctctctatttaccattattgccaaacttcatcagttgcccatcctgcaccaaaatcctgtgcgtgtttaaattcacgttgtcaccaaagaggtgcacagatcaacaacctggatgacgcaggtgttctccagggaaaccagaccaagtcaagtctccaggtaacttttttgaagtcttttttttaaggcgcgcaggtaccaagcaacagaatagagtaacctgaacgttcttactctcccaggcatggcccacgtggtgcttcaggtagaaatgtgcttcaccctcctggtggggggcgaggacacagcccactgcatgcagcatggtagagagctggggcgaatatctccatgtctttggaggatgtcagctggccgctttcagggcagagtcgggtgggcgttggtgccaccttaggaaggagagcgatgcgtgggtctggccagagctctggagccaatgccgggctgcctgagagcagaggaaatgcatggcccatgtgcatttctgagtattttaaactcgttcaggccctgcagccttcatgatgatgtagctcgcagagaagagcaggagcagaattagccctttcttcaggccatcttgcctcaaagggtacacatgtttggcggttaagatgaaactaacccttatgtttcatcctggccccatgatgtacacatcttagccatgtagtggccttggggggccacagagatttcctttgaggagcatggtagagtccacagccatggctgaagtcagtggacaccgaggggacaggactgcaggccaccaggggcctctgcccagagggaggcagagaggatggcggccacgggtgctctcctggcatcctcatggggtgatgccaggccgggcacttcaaaacaggctcagccgactgggagatcctttgtactttgcacagttcacacacacaaacacacacaccctatcccaagtgtttttgttagacacaaatgtcagcgtgtgattttggaagacttgtcagtgatgacaaaccatgatgcctgtgtttctgagtctttaaataaaaatgaacatggagaaggcttgtgtctacgtgttgggaggagcagggtccagcagaggccaagagggacccaggtaggagcagaacctgaaggtttggcccacctgcctgctgaccagcccagctggcttacgcacctgcctctcagtgctcttgtgtggggtgcaccgaatctgtatcaggatggcattagtcaaggagatgggagagtcgtgacatcaaatgtctgtacccagcacatgccagagacccaggagctgggcagtaagagccaagccacagaagccagcggtgggctgggtggggagggtctccagttcccctctaggggctcatgtgcctggaagggcagggtggcttgctgtagatgactcgcctccttttcttgtcattattcaagtccttcgtaaccagaagtgcctggtattaacctcggagaccagcactctcctggtcttacccttgtctctctggcccttggggcgcctgagccatggctgccattccctggagcacaggatgggggtgcagggaatcccaccaacagaagagcccaggagcccactgatctccagagaggtgcatctgtctccaatcagccagcctgacacctggcagagggctgggccgccagcctgatccatgcctggaaccacgtgtttcttgaaacaggctttcactgttctcttggctgagacacatctacgtatacatttgagctggaagaacacttagcaaagagccattttactctaccataaaaattaagtgaccttgccaggcagtggtgcatgcctgtagtcctagctactctggaggctaaggcaggaggattgcttgagcccaggagttcaagtccagcctgggcaacatagacccttgtatgagcaaataaaataattttttttaaaaaagtgaactcgtacaagattaacacagcatggacagtcactggggaggtagctgcaggcctggcactgtggtaaggaggcctgctgtgtgctcactctccctccggacaaggctgtgtggataccactcttgcctccatttgctacgtgagcaatcaaggttgtaagaggttaaatgaattgccccaggtcacatagttcagtggacagccatgactcaaactcaagtctacttatccaatgtcaagtctaccctcagaactcaaaagctgggtgccaaacctgtactccctaatagaattgatacctcaagcacaagagtgtaggaagaggagagccagaggaaatgcaggcaatgcccatcacagtctgtctggagagggtgcctggcaggccgtcccagccagcttgccaagtggaggtattctgcctatagaaattacacagcaacccatcagggcctggtgccgttttacattcaaatcacgtacttcactgcctgttttccagatccatgctcctaagcaaacaagtaatttgcctttactgatttagcaaccacagagagaacagtgggagtcagggcattatctgaacagtag

SEQ ID NO: 543 - DNA, 624881 bp, Homo sapiens
  source 1..624881: mol_type = genomic DNA
gcgatggttcccaaggccccgggctgggttctgtcacctgtagatagacttgggaagctgcacagcaacctctgcttctccacttgctgtggaccttggcaagacttagtttcctcatctgggaaatagggctttagttgttacctcacagggcttttagccacgtggtgggtgcagtgatctgaacggtgcccgtcccagatagcactaggtagactgagtgctgtttccaacctgtaccgcctcttgggtatacacacagaatgcttgtgcttgtggccacctctgcagggctgcaggggctatgtgtttttcccactccccgggttctggggtttggagaacacgcttaattctgtttttgcagtcatcttgggcagagatgactacagttgggcaatggcaggatggcttgccttccaggagcaccgcgtcagaggggccggcccccagatgcaggtggctggtgaggggtctccacactctgtcctgtgaactgggccatttccgtggtccctacctcatgggggcctagggcctggctgccaggtcttacccagtggctgtgagcagtgccagggcccctcctctggctctcagacacatgcttcatacttggagcggaggtagcagcacatgtggagcagggtgaccaagaagctttggccacatctccctgagcaccctgcaggttcttggattattggctgcattgttgcctgaaactacacagtctgaattccagtggactcttctggctggtaaatagccacaccgataatagtctgtgagctgagcaggcacagtggggagttctggatctgagtagctcctcactccctggagagatgtgtgtggcaggacagcctgtggcagtgctctgcctccagaacttctgcggcctgtttgcgggggggcccccgagaagatggggctgctgccgctcccatctgtccggaatcccacaaacgctcactattgctgtggctattctggtcccacaggcagatggcagccctaatatgctcactacaccgcaggctcatcctctagaaaggcagaggctgctcagggaagcttcgcacttaaagcaaatggagcatgacagcattgagacaagaattacactgatgtacttctcacatcgtttttttgtcgaaagaaaaacacacatgttgccactttcacttgtgaaaaatggaaacagttttcctgcaatgagtggcctcaatcactaaaaatgaatttgtgtatatttataacaaaacgtcgaaatgattgatattgatggcttcgttaagcattaccaatgagtaccaccggggggcggcacagcacaaggggagtaggtcagagagcccagggctcctgtggttaaacttttctcctttccatgaaaatcctcaaacacattttgtattttaattaaatgaaaatactgaaaatgatacagtagagagcacttttaatggaaaattaattgataacacaatcttatttcaatttactttttatttttaacttaaacgactgtgtattttccacagtcttatgatgagaaaggctccagaatcacgtgtaggtgtcctcaacatttcatagctcgaaccgtcctttctttacgttgtgcattgatatgggcttctcagttcagaaaacaaggcactataactattttatcagctacattaatacattgaagatatatttatcctttcatgaaagatacagcatttgaatacaatatggttttatgcagatcaggttcaaaacacccaaggcacacactttattttttttcctttttttttttcttttctgtgtttatttgaaggctcgtattaaaatttcaaaattggcatgaacaaagagttccagagtggaatcaatggacagggattgttgtaattttgaacataaaacggtaaagactgtggaatgtagaacaagttacaggaacgataaacaaaatcaccaatacagcatggattagaaatcaaagtgatgagatctgcggaagtctgagaaacaagtttggaaattctctgattccccacaaagcacgggcagtcctgtctgcatgcagctgctgtggtcacccagccactgtggaatgttcacctacttgcatgggttcatggttgtctacaaatacagaaacacattccagttcgccagttattaaaatgcctccaatttcaagtaaaagaaaaaatcttccaataattttcctagtaaggtaaacgaatatattcatctaggaaaagtggtctggaagaaaccattggaagcaaagtctaggggggtgccaaggtttgggagaaactattggatggtgaagcgggagagcttgagggtgaactacaaaagatatgaggactggaatttttcctgaacgtggaagcatagaggctgctgctcaactggggaatgtgccaaagtagaagaaactttaggaactaaagacaacaagttttcactggtgaggccaaagaagaagttcaacgtttaggtttaaaatatgcttccctaaagcggagggatggcccatgtcttcctggcttagttctttgccaatagacacaaattctctcttgctccaagccttagcatgtggtttgcttgtcaaccagagaggcggcccagttctgccactcccttggccttatggctagaagacaccctgctggggtgtggggagactggaccctaagggaagggtccggatctggctggccctccgcggcaccgctgcttccacccagaacaaaaggaaaagccgagcctcagctccacgcctatagcagcggtcacagaagcagattttgacgttttgcataattctgaaataacatgcacgtatccattgataaattgagaataaggaaatggaaccaaggcagattagctcagtgacaggagcctgtttactcgatgagagagatttttctggtcagttttagagaggcagagctggccacaatgcctgagataatctacattagattgcaagtcgggcagctttttgtttaattcagacagtgttcactgtttgtttgcaatcagaaccacaaccttagtgcaatagtatatttatttttttacagtaattttggttgccatacaagagatttaaggattgggagaaagtgcaaattacaggagcttttttttttttttataaagtctaaaaagaataaaagcacaaaagtaacagcaacatagataatgcgaacacgtgttgttacacaaactatagtgtgaaacatattagtatttaaaaaacaaaaaaaaattgttaatgggaaaatcaatattgtggcccacacacaaaaagtcattgccagatcaactggataatgcttgcttgttcaataactgagaaaaaaatttaccattttattaactaaagtatcacaaataattcactttgtgatatgtaaagttcagcaaatcaacagtcacattgagtaatttttatattatgtgaattaacttaaaatgtgcgcagacaccctggaaaaggtatcttggcaggtatacataatttacattttgagagatttgggttttgtatacacaatattacagaaactaggcatgtaaatgcagtttatttaaattacagtatgtaacaaaagttgatcttaaaacctggaataatatcaacatgatctttagatgagcagtttaacatttgttccaccattaaagaggggcatggaatagggcctcgtcctaacatgtcccaaagggggagaacagtgggtggtgatttgaatgaggaactattgctttcagtaccaaaataagcagatagagatagagaccgattcatcttggcaacatgtgtttatttgttggtcagtgcaggttctgataggtctattacttctctataataagacagtgtaaaaataaactatgttatcagctctttagtcttgcagccagcttgcttgtggttagtggcatgtggcttggagtatctttaagaaagggaataacatctggccctcaccaactggctgccaaagttcaacaaaccgaagtcacgagtttcgactggttatcgtctgccagcggtttccttgactctcctttgagctagtgttttgcctggcactgagcacagaggtaataccaactgtaggcccagggaaagtgccatgccaaaggaatggactcacggaattttgcggtatcatcaaatggaagacaaattaatggccaaaccaccatttttacattttctaaaatatggggcagcctcagcaggccacctgtagtatcctgtcttgaaatttatctagagtaatgctcattcatctcatgatggaaaaactgaaagcacacggaagtaaagcgccttaatattcaattgacttcaagttggattggatcatttcaaatacaaagattgacctgcaaaaggttttggaacagaaggtccaaaaacttggttccaacatcaggggtgtgtgactggaaaagcgcgtgtgtgtggtgtgtgttttgtttttgtttttggagaaactgctgcattatgaattgtaaccactttgaagaaattgtccttcaatgacgaagttctagcaaagatagaaaatataacacagctctgctggttcagatgcatccaaataaggttgatttaaaaaggtcatacttttataattattccacagaaatagtattattaaatcacaaaagtttttttttctttaactttctagcactgaagtggcacaaaggctgcctagtagaccagccacttttttttcttaaaatattgtgcttataaactatctgtacaactatttaaacttgcagtaaagaaagattttaaattgctaaattttatgtgttcattctagagctgttccagacctaatcaagaaaaaaaggaaaaaaaaaaaacaaaaccatgttttataattagagatgggctgagctagttctgaaataataataaaaccaaaaacctgacattcgagtatcctccaaatgggggagaatgtgctggaagcctgactgtgtgttttgcggcccatgtgcatctggtgacctcttttggaaattcgaggtattgttatggggtggagggactccggggaaagaaaggggcggggctcaagaaagccttgccagagaggctgacctggcagcccaggagacctccctgctttcctctcctcacgcctctgctttcactctgatcctgccgcccaccttctgttctcaaccctgggttctgtctatactccatacccactgggtcctcaaagaagctgttgtactgttaagacaagctggtgggattcctagacacccagagcgataggggaaaagcctctaagtaccatcttccctggcctccgagagcaaaaggactgtctcagcagagatgctcacccttggctgggcacagaactgaggatgctgtgcccgcccagctcccagaggagacgctgtctcactggcagccgcatgtgcccgccatgagccatgcgtcttcttgtccttcatgtcaaagtggatgctcacctgctctgatctttgcagagctcaagacatcttcaattaaaaagaattctgagaggcagagaagcccttattctccatcctggatgggtgctcatggcagacaactgctcttgtcctggagacctggagcttgggcagttgcacgctggctggctcccttggccaggtctcccctccattgtggaatcgtgactttgtgctttgactaactccatgtgacatctgcttggccaccttggaattatgctaacagatttgcagaaataaagaaagctaagcaaagctgggcacgatcccatccaaactcccagcactgccaggaacctcatggccaaagagccatggatgcaaaccacaggaggagatggggaaaagaatctgtgtaggaaaaagtttctctgcctttcaggcccatgatggggcactggacaaatgcatctgggagcatctcactgcaagccaagtgcaggagaaagaggggcaggtgagcatcaggtgtcctctgagaggccacaggactgaggaaaggcctcatgccggggcctggggtggtgagagctgcccggaaagcagaggacggaggtctcaggaggtatctagagtgcactggtgtctgcctacaagagctaggatcccgtgcaaaattgacggggagcctctcggacccggcaaagcgaggccacctgcatgctgggcggcaggctgagaatctttttccatgttagaaaaactccctccccttgtcccatgtgtgatagaaactgcccaagacacccacatggtgagccaggggtctgaagacccagccatgttgtggacacaactcagtatttctttgggtaccaggagacaaacccatggagtggggttgatgctcacagacttcgcttggcattcagatgtttcagcacgagcccatctctacttataacaagagcagtctgcgaggtggagagcagccgtccttatctgtccagcagctgtttcaaagccctttctatgttcattctgtgcccgactcgagttaccccaagatcgatgaggtcctccttctgcaggtttggtaagtgactgccatcgatctcattgtccatgaaggcctctttatgttcacccaagtttagactttccagccaatcggccacatctggtttagtccacaggtggacaggtttagttgtaaaaggcttatttgagattggctgttgcagtatcgagggggatggcgacctactgcgtcccgctgggttcaagccaaatagatccccagaagggggctggcttggaaggctaaagacatctgagagagcgggagaaggagaggcggtggcagcagacaggggggcgggcagggtctctttgttcatctctgttggcgagaccacagggcttggggcacgtcttgttcctgaggtcctgctttcatagtcggggggccggctctgcagggtgatgggctgggaggtgccggggcgaacagtgaaggtgaccgtcgtgctccgtgtacctgagatggtgctcatgatctccgggcttctgaaacagcaacacagagaaaaccatcacaaggcaggtcaccgagtcagggcagctggctgcagatcacccaggaaggcgagggagacgcccaaaccatgccagagtgtctagtggcagatccactggcagtgaacgaatgatttgccatgccagggtgggggagggggagaaaggggccagagcaaagttggagacaccagagcacaccacgtcagcccactcacctgaactgggacagaggggctgggggacctgcctgtgctggggggagcacaccacgtcagcccactcacctgaactgggacagaggggctgggggacctgcctgtgctggggggcagggccgggggaccctcgggagggtggccactgaggcatttggaaggggtcccttgaagagggcacggagacagggacagagtggggtcctgtcacctgggtagaacgtgccaggcaacatctccagcgcctcagcttcagcaggtgggaaggagcacacctggaggacaggcccctcagccgcctggcagccttaggctttttgggtaaatggacaagagcagggcaggatccttcccaggtggcccctttcagtaactggaacccctgtagctacgcagggcactcaggggttgagatcacccggaaacccagacagcagggcgtggcttgtgtggccagtgtgggctgcgctcaccttcctgaggcagcactgtccagcgcccacccagtggacagttttgttgcagaaggagctggggtaccctgtgttatttttagcccctttcatgtgagaggctcactggtaggacacacgggccttactgaaaagcagaacgcgtgaggagccctgtcttccccagggtggccatgggcgtccccgagggtcccctgtgccttgccgctctggctgggcaggcaaagccctcagagctcaagtcagggaggacgacccttctagctccaacctttactggccccagggtggtggccagatgactcccacaggcaggaggtcccatctcagtgccagagaagtccaagtcctcacgcttacccacgtggaggtggcctttcacacaccactccctcacgggctctggccaaggcctgtggcaggcactctccacaccaagagaactgccactctgggccctagtgcatgttttgctgtccccacactgaaagcccattcatcctattgtccctaggaaagccacagccactggggaggggaggagaggtgtgggtctcttgccttttgggcccattcacgtggatatgaacggcccacccaccgcttctgaaaagatccatcctaccacggctctctcttcaagacctggacttgagagatgtctgctggagccctggctctgtcagatgccagcttgggtgcacttttctcctgtctccacatcttcccacatgaagtgggctcctctccctcctatgtggtgggttaccctgggtggaggggctctggagagcatgaggagtgcactggtgtgacatcgtgaccgtgaatggtggtgggctgcagtgtctcagtgaaagggtcatgggcaagagggggagagctgcaaacagtagagatgctgccgtgtggggagactccctggagggcaagactgaagcccctgcccgtctgctgggggccagttcatcgacttgcactggggctgtctttggagctcaatggctgaccagttagagcagcacttcccaaagaggagcccacagacccttcatagaaaccacctgggacactggtgggccgtgaggactcctgagctcgtctcaaacctgtggaagcaggagtgctgtgcatggggaccaggtgtctgcaattaacaaactccccagacactgagagaccctgaaccttagaggccatttggttgggccttggttttcattccagggtatgcacaaagctaatggcccagaaccctccaggagctaaaagcaaagggagtgacctggagacgggccccgctgctggtctagtctgtctctctccgtttttttcttttctctttctttaccatggatgtatatttgggtgaaaccacccatcagttacctaggttcccctaagctgtgggtcagtttcctacttgatgttagtcactgttgcttaaagtgtggactagtccatagtgagaaaggaggggcaaatctgaaaggggcctgtgctgtggactgaggcttcaatcctactgtgagaagtgtttgcaggggctggtgggtgcactgctgggccagggaccccatccacccatagggtgttcacgtgctattttccagagggctgggtgcccctgagtgggagatgttacaaaccaggcatccccatctagaacctgcccccaccctcaatggtggcttgctggtcattggttatactgctcacaccaacaggcacaaggcaggtgagactctgaggattcctccactgtttctgggcccagttactcacaatcaagaaatcagaggctgcacacggtggctcacgcctgtaatcccagcactttgggaggcctaggtgggtgaatcatttgaggtcaggggttcgagaccagcctggtcaatatggtgaaaccccatctctactaaaaattaaaaaaaaaaaaattagctgagtgtggtggtgggcgcctgtaatcccagctactgggaggctgaggcaggagaattgcttgaacccaggaggcggaggttgcagtgagctgagatcgtgccactgcactccagcctgggcgactgagctagacttcttctcaaaaacaacaacaacaacaataaaaaaacccccaaaaaacccgaaatcaaatcagagcccagtggggcttcacagcaggggagaggggccagcaccctctagtatctcagtttatactctcaagagagaggtggcctatggacataggatacacgaaaaaacctgcaacccccccttctctggtactcaaagaaggtcgaaagaccagctccagttccaacttaaaactgggggtgctgtggcctgttcttctgtgtttattccagagtcacaagagcacagttttggggaaggcttatttgtccacgttgataaaacaattaagccaagatgattgaaatcaaataatgggtaagttgaaagccactgcattcagaggtgatttggggtgttaattagggccaaggaccttggggcacagggaatgtttcctataaaatgggaaaacatcttacaagaagacatatgcccacagaggactagaggaggaggggtagctggggtaaagttctggtctccatgtgcttttgctaaagctgactacatggtgactgtgcctgcagccctgactctgggcagctccaccgtggcagcatgactggtgcctggccttggtgctcaccaggcctgtgaagcagaggcaagtaaagccccagagtgagagcacctacctcacgcctgggcagtattcaccacgggtatctctggcccagagggttgccccagtgctgccctcactgggaaaatacccagctgttcccaggtagttgggattgattttggtttttgtaaggaaaggctctgcaggcagctgtgtgtgtggttaggaagcgaagaggaggctctgcaaacacctcggtgggcagcgggagcgcgagagtggcacacacggggtcacgcagcagcacagcaggtggcacttacttctgttcagcacgaccctcttctgttaacaccggtcatgggagcaaatgaaaatgacaaatggaatgacttgagacaacactgcaaaaattaatgaacaagaaaggaagaaacagaaaaaagctgcttttcgacagatgaaatgaaggcagtggggcagaccctggctgaaagcccatccgtggtggtcccttcggcctgccacagcctgcccagagctgaaacatcaatatggcatcactttcatagggagcgtgggaaactcacaagcttgtcttctccttctttggcttgggataatgtaaccacttgtaaagaagaaaaataaccaggaaaaaagaaagaaaatagtagcattggagtgaagttcgcctctgcctgaagcccactgagaagcagcttattgccaatttcctacctcaggtgcctgaactgtctttcctgtggcttagggaggataaacgaacattcctggtgggggagggcaccccaacaggacaagtgctttgcttcaagtctacatcatgagatgacagcccagccgttaatcacatgggcgtcaagtgcttggggcctgccagtgtcctgccccacattgctatagaaagtaaccgcctgtgagtgtgagacgcagggtgaaggccaccctgggctgcccgccctgccctcctcagcagcttgactctcttggttaatcacattgatgatattcactggatcttcccggttgcacagatggttacgttgctaagcaaccgctgggttcccagtcggaacacacaggaatctgctgccctgatttagaacacagacacatatacacactcacacccaactccccaccaggtcaccactgtctaccctgccttttaaatcacattcatgtagaaatgtgagaattaaaaaaaatcaaggtaattgagacactcagagaggtgctcttatttcatcagtcagtacaagttaattggggtgaggtaagtaaagaagcaagtggcttttttactgtttacaaattcaatttggcttttttttttttggagacggggtcatgcagcaatcatagctcactgcagcctcaacctcctcaagtgatcctcctgcatcagcctctggcatagctagagtaatctgctctttaactgtagctgaacatgggccaggggctggtcagtgatgctgattaggcatgctggttctgtccctcccatgagccgcctgtcaagggcctgctgggcctggccagcactgaggctggacttggagcctgtcaacatatgttctctccagcacaccgcacgcctctgcattttagtgatgagcccccatcttgcatgaaaatagcacttatttccaaactgctttcttattttttccatctttacagcctcctgataagcagggcattgaaaagatagaaccggaggcagcaagtccttacctagcttccccgaggcctggatgtggggactggagcccatattgcccagctgtgccatgtgttatgttgtgtctcagcagctgccaggcctccgcctcacccccagctctgagtgccatgagggggtcctggtctagttttagtccttgaggtctggcccagaacaggggtgcgataaataattgttgactgaagtgttgatggataatatatccttttcccagatcagaaagttaagtgacttgaccgagttacagagccagacctgggagtggggcaggcagcctgaggctccgcggcagttccaccaggaatccaggtcttcaggccaggaggttcgcagctaagatcaagaaggtgcccacctcttgggaagagagattaaccctgtgatatgcttttgccaaaagggcctcatgtccaaaatggggaggaagattctgacttgagatttgcctgttgatgggcaaggacgaggcactcccattcatccttgcccaacgcccgcaagtaccagccccgatggacgcacatcctgactagtgctcccagccacccacagtcgcattcactgatgtcacattcacttttccatcagggcctggaaaccctcaaaccacctagtggtcctgagatgctgaaaacaccgtgaggcagcttctagtaccaagtcagttttgaagcagtctgtgctctgggaccagctgggcagagataactttttaacaacccaaagttatttgaaaatcaagaggctgtcaggataatactgcagagagcccagtagggactggaggccttgggaaggggaggcaggtaccgtgaggcagcaggcgcaggggcctcgggaggaaaactcgcctgagctcacatcccaggtagcctgaactccctcaggggcctctgggacctggagtttcacaggacaaatctccctgaagcccatccatcccatggggaagcgaaggccaatctcgaggtcccttctggaccccacccactgcaaagggctggcgacctagaggggactctggggaactcttataggccatgcaccctaacagaagccatgggggacccccacaagcacacactcactgctctgttgcccccacatacagagcaaatgtgaagctgacctctgccatggaagcgatggtaaagaacatcagatttatctggctttactatcggcgcctggtatgtgtcagtatctctcaataaagctggagggcacatgacacctggggctcctgggtcatagcaagtttgttttgggtcaaagcatataagtcaggcaagctgctgtgttctcctgggttccttaggcacttagcccttgagtctccctgcttgtctccagaatgcaggccctacactcccacagcagcctccctgtgccaccagtgcattcacctgatcacacagctgcctgggccatcttcaggaaacaaagtctggtcatgccaagactttgctgaagccctctgaaggcagccatatctggaactccattcagctcatgcccattacctgcaagcctcttgtgacctggccctgcccagccctcctcatctggccatggtttcatgagcacagaaggcactttctggcctcagggccttgtactctctgtcccgtgcctgggatgctccactcctggttttctgcaaggttggctcctttttaaatttctggtcattcaaatgtcatttccttgcagagtgtcagtccctttctgcacatgctcactgtaacctgctagggcatcctagtccgccctttctgcatgtggtcagggttaacctgctggtgtcccgtggctctcttctgcacgtggttatttttacctgctggtgcatcacagcccctttctgcactggtcactaacctattagcatgttgtggctcctttgtggcatttgtcacagtttgggtttgtcttattatttgttgtccatttctcccctcgagaatttgagctccccaaagggaggggcatctggaatgttttcttgttcagtgataaatcctgggcacagcatggcacctggcacataaaggcaatccctaactttgttgagtgaatgattagtgacggaattgctgccccattctgagggtccaggcatccttgttggtgtattcctcgttactctctagcctcagcctggcactaggcttatagaaagtagctcagtgaactcctgactggtgaattcaggagacagtggggctgggccatgattccaagtctgagtgtccagtcagtctcctaggcctgcacctgaggagcttccggctctgagcttttgcagccccaggctcctgtgctgggacccccagcgtgcagcactgtcaggcctctgggctggcagctgttgtcttggcattctgctgaggagggaccactgactcttcacagagacacactcactcttccttccccaaaccagtttccttcactttgatccagtttgagatcaaagatgagactacctcctggaataatcaggccaggtggtcctggaacacttttcttagaactgacgcctccattcttggcagggtgttttcagatcaccctgggagatgcctctaatatgatgtacttttttctcttttaacattatgtactaaagagaactacttcatcatcttcctttcgtcggcgtatttgtaattaagacgcctgcaaattccatgtcatccttgatttcagggaagagctttgagcatcagagactcattcacggctaaagttaaatcaaacatacccaaggaaaacaaggatctagttgtttaatcttcagctgcttcctttgatcccatcctggattcttgcaagaagtgaaaagaaaggaagaatccaaggatgagaggaactttaaaagggtcaagttcagctgaggtttctgcccatttcatgaatgaacatttgaggaacagctctaaaaattgtccctttcttgggcagtcaaaacttgtttctatggaaatgggatttttacaccactgcttatctgtcatttcaaaaagcatggctggttttcaattttccctagaaaaactcatttctttttcctcggtaggaattcccttcatccaatttcgtgcctcattttgcccagggccattcacagctcttaatttttagatgcatttaaaggtggtggtgagtcgcccaggcggtgaactcaggtgagagttcttaaggctccctctgatcctcagatgatcaaatgcccagggcccatcagtgaagaccacgcccagcaaaggagacatgctgagagataggtctgtggctgagaggagacagccctcacggcaagggggacagctctggtgccctggcaactccgtcctggacccccccccagtggtggttctgactgccccccacttgtccttgtcagtgtgtcccgtggccgtggcgcacctccatgggggctttgtcccaagtgctcagcctggtgaggttattagatccgagaagcaagggcgagggagaggattgagcctagtttagtgcctacagtgaatgctcttcatctttgtcctctggcctcaggccatcctgtttctagtccaactctgagtgtaaagtgtaacccttggccgggagcaagaagggaacagacatggcctctgggagcttggcagtgccagtgaacccctagtgactaagcctgctgttatcggccgcagggtgacctcctagtgactaagcctgctattagcctcttgctgaccaaagagcttggcctaaggacagtcagaggcctgagagcagccccgcccgcggcagtctcagccttgcaggtgttcggtttgccagttggtcattccttccaaggcagtccctggctcccacaaggtgaggagtcaaaccctgagccagctccatgggttggaggtctagttccgcgtcttcctgtgaagtagcctcggctcagtagcttcaccgccctgccttctgcttccttgttcacacagtgggaaaaattacaggccctggctcaggggtgccgtggaatgtagtgcctggcgtttggtgaatgctttgtgtcataggtgtgggctcctgttcttactgtaagagagccgggctataaataacaggacagctgggaggcggccgttcttggcactcacgcgtgggtcggcggtggtatgcagctgctctccttcagagtacagcaggattctgccctatgaagtctgctttgagccagccccctctcagggtccccctggagaaatgcagggcagagaaaccctagagacgctgcaagttggggtcccactcccctgtgggcaccccaggagctggcccagcctgaagacgagtagaggggatgagctgtccagctgccactcagggagaggtctccatggacggggtccctggactccccgagtggagtgctcaggggagcacagcttggtgcaggatgccctgctgacctgaacagtggattccttcctccagccctagagccattcccttccagctccttccttactgcagacattgcttacaaggggaagtgagagtcaggaaaccccagcctgtgtcccagctctgcctcctgctggctgtgtatgtggacaagccacttatcctctgaaaaatgggtgtgactcatacctgctccccagttgtcataaaaattacccacccatgagaaagtgttttgtaaaaatgtgaaacactaagataaggcctctttaattattgcttccacatagagtaatgacggaagagccacattagtatgtaatggggaagggttaaactagtcagtttttcagatttttggcccagtgcagtgactcatgcctgcaatcccagcactttgggaggctgaggtgagtggttcgtttgagcccaggagttcgagaccagcctgggacacatggtgagacctcatctctaccaaaaaaaaaaaaaaaaaaaaaaaaaatagctgggtgtggtggcatgcgtctattgtcctagctactcaggaggctaggtgaggtgtgaggattgcttaagcccaggaggtctaggctgcaaggctgcaatgagccgtgatcacgtcacagcactccagcctgagcggcaaagcaacaccctttctcaaaattcctggaggctgttgagtgtacttgtaggtgtatacgtacataattcttagactttctccttgactggaggcactgtctgaatgtctgcagtgtaactgtgcttctctataccaatgccagcctatcgatactcctttagagtaatagatgacatccaagtcatttatttacatccacactgaaaaataactgggaaaattggggctctcagtctgcatcttgagccccagctgtatgtgatgtcactgattaatgcactgagtggcttaaatcaaatgcctgcccagcaggggtatggagagaggcttcattagtcaaaatgatgaaacccaagatcaaatatcagtgggagagactgaagatgctgccacctggggaacagcaaaatggtgcacaccacagggaaggagaaccaagaaccataagccatcacgggagccaatggggctccccaaagccacagactgctgagccctgatacggtttggatctgtgttcccacccaaatctcatatgtgaaattgtagtctccagtgttggaggaggtgcctggtgggaggtgatcagatcatggtgggggagttctcatgaacggtttagcaccatcttccctggctactgtacatagtgagctctcatgagatcaggttgtttaaatagactgtggtacctcccccgactccctcttgctccccctttggtgatcactgaaagtttcttgaggcttctccagaagccaagcagaagccaacatcatgcttcccatatagcctgcagaactcgagccaattaaacctcatttttttataaattacccagtctcagctatttctttatagcagtgcaagaatgatcaaatataggctccttccagacagcctcagatagagccctctggttgcgtctagaaatgactcctgacttattctacgttcagttccaatggaaataatgtaaaccctgcacaatactgtgaagggctgacatggacacagctagaggcttctgcccctgggacaggatgggctggcagggaagaatgtactgcacttagagttcaccagtacagccatgaccctgtgcctcccaagcccgcaaacctggtagtgatgggaggggaagaagaacccacacgtgtattcagacacctgcacccaccgcccacccactcgctgccctcttggggcagctagtctcctgcaaccaactcgaagcttggtttgggctttggcgaggctctaaacggccttctaggtggtcctggcagagatctggagggcacagaagagagagtagagcttctctttggaagccaaggtgaggagggcttccagcaacctcatttcattacaagtctttatgaaggagtgctgtgtcccaccaggatggctgtgatcattactcggctatcccggagtccaggagcatgagaaaaagaagtgttactgcattaacagacgtggcccacacaggctttacgaattcccctcttcgtgtccgctggggctgctacccgagggcctttcctggtcagcagggacagtgcacgcagagcggtgtgcatgtgcaccaaccgcggacttaccttggagcgaggctggcggacttggctcccattggtgaatccagtccttcccccggctttgccaatttctctcggttcatttgctgtaggatagagttcaattcactaataacgtttgcctttgggcctgagagaatcgggcttttgatctctgtgacgtcgccccacaacttggaggtccttggctggagaaccttggccatcccaggctgggcactgcccggcgggggcgggggagcgggcggggggataacaaagctatctacatcttcttccacgagcgcgtcttgataaagtgcattgcttttgtgaatgatgggcttcatttttggcttaggaggtactgggggtttgtcaaccataaatgcttgcccatctgcatagactgtgcaggtgtccacattctctccaccttcggaagacagggtggagatgctagacacggtggagatagtgctggtcgtctcgaggtggtggtcgctgctactccggctgtccacctcctcgatcccagagtcggcgacggcgtcaaagctttcagggggtggcaggaatgaggcaggcagacagtttgaaagactggctggcttcttgctgtctgcagagttggttggttggctggagttcaacgaaggggactgaggggtgtcgcttttcttctgcttcactaagtctgagagagccgggacagaagctgcccggtcatcggggatatcaaaactatttgcaaattccaggggaggaggcaatggctctgtaaaaataaaatcctcatccaagtccacggatgccagagggggaggagggatgcggaatggcaaaatcaccgcctcttccatggagcccaccgcgacgatggttctgccgggcacggtggtgggctcgggggcagcggagatctgtaaagcaccttcggtttcggaaacaccttctggcacctcggacggcgagctgtctggcttcatctccacctctgccttctcgtcctcttcctgcagggcgttgtccagcttagtggcgtccacggtgtgcaccatcagcaggccagccgacttctgctgggacgtgtccatgatgtcgatcagcatgttcttcttgtcatcgcctttccggtctcggcccaggtcggtctcgtacttgttctccgtctcctgccgcctcaggggtccccgggtgttctgcctggtgaccgtagggaagccggcatccaggctgggccgcattttggtatcaatgtaaagaggtttgttgaggtcggccttgggggcctcccctttgggtccctgttgagactccttcatggctcggtcccttgcggagagtgccagggccagcggggagctgggatcaagcagccgccctgtgagtgggtggacataattcccggggccggctgtgccgctgctcgcggagggcactgctgggctgctctcgggcccctgggctttggacgtggaattcagcggcctcccagcctcacccggagcactggcctcggcgccacccacgaaatggttttcgggctccctgggcgtggcactcggcatgggggatgacagctgctcagcgctgtcctcgtcagcaaaatccccctcctcggggaacatggagggccgcgtcctgggggcgggtggccccaggcccacatcctcatcccccaggtctgtggagaggaaggccggggagttcctcctggcttccagccgcttctcacggtcgcggacggctccggcgatggcggcggcaaaggggctgctgacggtcaggctttcgtcaggccgcagctggctcggtggctccggggcctgggggtcgatctccatgctgctgccctggctgctcttgccgctgctgctggtggacggctccttcacgatgatggtcgggatagggatggagcacgtcttctcggggctgtcctccacgttggactgcttcaccagcatccccttccgcctggcgggcttggcggggacgtagacggctttgctggcgatcttccccacctctgagtatgggttttctggcatctggcctctcttgttgcggaagttggcttgcgggccggcattccgactgtagaggtcttcagagtccaaggagtagcggtccagctctctcctgaagtacatccccttctccctcatcatggtggccacggtgtcggacctggtggcgggggacaccttggcggcagaattctgattgaacgcaggcttaatcgtcccgtagactcttggagttggggacttggggcagttgtaagtggttggggaaggtggtggtggggacgggggcacagactgcggtggaggggggatgtcctcagaggtgtccggcatggacaggcttctggtgaacttcagcattggaggagccagaaactgccgctcttcctctgttattcctacaagcagaaaacaggtttagctttaagtcacaatagcaacaaagcctaagttcctaggaacgtgcgatacgctacatctccacaaactcacaaattcagatgatgaaccggatgttcaggaaacacagcacaagccacgatgccgagtggttagtcacatggcccgtcgtgagccaaaggacaagaaagggaagaacagaaaggcactggggatgctgtgagtacgctgctgctgtggggcctccaggcacaggctgcagcaggggagctgtgtgaggccagggcaggagggcccctgacgctgagccgtgtgccagtctgcaggccaagtgggcagctcgccttggggctgcttgtgcgtgtgtgtgtgcgcttacgtgtgcttgtgctggcattgtggcattgtgcttggggcggggttggctagaccaggaggtatccttccaccatgccccttcaggcatggtaagggctcctgggggtgtttttagggcaggggtctaaggctgtcacctgtgcatctgaaatgagagcaaagggttgcaggtattgctgtgtttatgtggcaaggatggtgtgcagtccaccgtccagatggcacttgagccccacggctgcccagatgtacagggaggcctctgccaccctgagcgaagccatctgcccacggttggctctgtgcgtgctgggaggaggtgcttttcttccagggtcatgtgaatcctttcattgcctgacttcactgggccccactaagggttctatgtgtcctcgagctctctggaccttcagagagatggatggctggggaattgcagctcagaggaggggccatgtgggctctagagcctgcccctgaggggagggagcccaggttcctttaaagtcctggactgagccaggaataggatcctgagccaggcctcagtgagccccttctgggtcccagcggcagccctgaaagtggtcctgccaagaccctttggagcaggggctgagagcccagtggaccaccataatcgcaactaaccagggtccaagtgtggctgacctggcacaaagtatgagttgacctaatgaaaatatgtggatgttgaatgtgtggggatgcagctgaggtcctacgacagccagcagggtggcctgagggttctctgggtgtgttgcctaggtgtgactttacagactgttcaacagctgaagacacagacacgtcaacaggagcacttggagaagggaagcgagacacgcacacacaccgacagacgcgtggcacagggatttcatgttgggagcatgcaggttttcaaagaggtagcaaaataaattacttgaaatgaaaaaaagtcctaggacaaactacaataatttattccaatgaaaacttccattcgataagggtattccaaatttaacatactccttgtgggaggacattttggcattgcaaagatggctcgttcaaagtgttctccattgaccagtcactctgagttggctgtctggcaattctgttcccaaggagtactaatttaagaatacaccttataaagtaaactgggttacattcagattacagattccaaaccgtaaggttcactaacctgatagaaagattctgctgtctgacaggaggaaatcagttgttattaaccagtaaccgcaagacaaatacgcagctttccctgagtttgctggtgcagggggagctttaagcacagcagacaccacctccacggccacttactgcctagtgactgcctacagttatccacctgagactcacaagcacgctgcgcttttgcacagcagcccagaggcatttccagaacacacaggacagtgcccctggggtgggctgggcagaccagagtcccagggttgcctccacaactctcacagggcaagggccttagcttctaccagaattgacacagtaaaggcaatgctgaattatctcacaaagggactgtctcaaagggtcaagtgtgaccttgtctcaaggtcaagtgtacctttgcctgcaacagggtcaataggaataattgtgacattaagaagaaaggaaggcagttttctgcaacacacagtacattatttcatttcgagacctgacccaaccacccttggaagtacatctgctgagctcatactccaggcctggtggtggctggggaatgcagggaacccacttacccttcccaccctgagcagggcagggtgggggaggggggttggctcgcaccaccccgcccaccctcccgctttaccctgctggaattatcacagataactgggcttcaagatgacagaagccaccctagattttgtgtccttcaggggggatgagtttcatgccactcagatgttccaatggctccctagtgggcaaggccaggttcccaccctctggtgggtgggctggcagggccttgctggggtgggacgccaaggcaactgtgagaggcccagggctcagaattcctgaggggcctaaggctgtgtttgaaagcccaggggcaacttctgtgggggagtgccacacttcttacctattgatttctgccttcgcatcgtacctcgagggatgcccagaaacggggcttttgggctcccaggaacagtgggcgtcatcacggcgattccttggcgttcgtacacagactgcaaaccagagagcctagggtgagacgcagccctggccagcccccacccacggtcacagggcccagagaccacaagggaacttccgtcactgtggcttccccaagctgcttctggagccacctaaagtctccagtggggctgatgagaaccacagcattgaggacccaggaaggtccctctctaggtgcctttcctattcgctgcagctgctattggcctttggccctgttaggatggcagcatgccctgttccatggagatgtggtctgctgcaacaccatttgccagagcagctggacagatacgtctctctgagaggggggccaggctggatgtcctgtgggaaagggcacagcgtggtgggcagtggggtctggcctgggtccataccccactccccatgtgccatgtgaccatcaagtccttacataggagccaccatctcctctttcataaaatgggctcctgacaccagccccacagtgtgtgcaaaggccaaccaggtattgtggtggtgtgtgggtgagcatgatgtgccagctagcttaagcaagccctggagctgctcaggggcacagcctggagtctgcagcagtgagctgtccccagcttcctccctcttcagcctgtcccaggaggagcctagagctcccctcctcccctccaccttggaagcagagtcctggtgctgccaactctttcgcttccccaggctgttgttttgtctgcaaaactgagatggctcagggccccaaacctgtagtgttgaaggccaacccgggaaaatatcagatgcggacgctcaatggaaatattcgtgtgcaagcttttattgctccagctttgagatgcagtttccatgtgtccacagcctctgtttgtctcactctatggccctgaggctgaggagcaaagtgggaccctttgggagatcaagggcaccttgtctcagacacccccccaacttggtggggcatgtgggtgccacgaaggactgggaacaaagtgggaggcaaggaccggcaggcagggcctggaggggaagtccccttgtggagttcagaggtgatgggaggaggtgtgagggcagatattgtaactgtaattattaacagttgtttaatgcacattacagaaaagccttgtggtaaatttataatatttataggtgttattgttcaagaaaaagctagacataggcagtttgatactggttcaaagagaatactaaggtaagcaatcaggacaggtaggcagtgctagaatctgacatcaggttcagatggctgcctctgcacaatggagaagcaatccaagggtccaggaggccacgccttgttcaggacgtgcctgggggaatcagcagcctctgccccaggcccttttccagctgtgtgccctcctgactgcctagggaaggtgaccatggcacgggcagcctgctctgagccaggcacccactgcgcccagcagccactgaagcccttcatggcacttctggctccgaggacaagtgttgcccaggatctcggagagtgtgggggactgccacatgggatgtgggacagacggcctcttccacaccggagcatttctgtgctctgggtggaccaggaggcaagagcccctctgtctgaagagtgtgtcaaggccccttacttccatgtgctcacgggtcctcagccaagtatgacaggacaccttcgaggctcagggcactgagtgagcggtaagggcagggcttggatgcagcctgctctgtcccaccactgtgagtctgcacagacccggctctttgtcctgtggccacttagatttgggccccacctctggacagcacgaaccagacatgaaagcgtgtgcacctcagctactgagacagcccacccacttcctgggcaccgtcggcccccgccctcgtggtcccaaggtacggccactcacgttcatgtctgagcccgccgggaagcaccggctgctgggccgctgcttgatggtcgccaccctcggttccacagccatgttctcagcagcgcgggagggcttggaggccgggactatctcctcgggtttatctgcaatagaaccgtgaggattggagcagcaacaccagtgggggaagctgggtgtagataggaaagcgcacaggtgcagcagccactccaacatccaaaactgtgcagggggcatttgttgctgctgtgaggagcatgcgtgtgcctctgccacatgcattcccactggggcatgggctccttcccaggaccttgccctcggaggcatgcacgaggcatggacatagaagaccctccacagctcggccaccttcttaagtgcccagcccccaagggctctgaagctttttgggacatttctgttttttgggacatttctgtgttttttttttttttttttttttttttgagacagtctcttgctctgttgcccaggctggagtgcagtggtgcaatcttggctcactgcaacctccgcctcccaggtttaagcaattctcttgcgtcagcctcaagagtagctgggattacaggcacctgccactacgcccagctaatttttgtatttttagtagagacggagtttcaccatgttggccaggctgatcttgaactcctggcctcaagtgatccaccggccttggcctcccaaagtgctgggattacagccatttgggccatttctttagtggaatcacttgattctttctaatgggatttattcttgtgagggttaactaaactgactttttgaagtttttttttttgtttgtttttgtttttttttttgaagagactcagacatatggttcctttgtaactgtgattgccaagacatgaggatctgccacccaaggcagcgtgggtgtttcagaggccagggtgctcgtggccccaggcgttagtaagtgttgcagagggaaggtctctgtttattttccccaatgcagaaccttcccatttcctttaaaaaaaaaaaaaaaaaagaaaaccaaagtttagttataagggatccttagcaattaacaaaagttttttaaagaggacatttgcagcacatttttttttttttttttacttgaaaactgaagcacatcccagagctctcctgacgccttagcttcatctcagggtgtttgggatcaggcataagggtgtgtctaaggctgtttaaatgcaagggccctgtgccactgagacctggagagctggtcttccagtcgcgatgtgcattctggaaaaggtgaccccagctgtacttctaagatgtcactgggttgggacaaagccagtgtggtatctggtgggtgtaccccattctgagcctttgagacagcactggccttactccctggggagaagcaggccatctggaacattctgccttctggccaccctaagcccactcttggggtctggtggctcccatgaagtgtatgctagggccttgcccagactttgagccatgaggctattgtgcaagttagagctgagcagagtgcagggaggaaggcccccatctccaaattgttcttcaagctgaggcggaagttacctgtcatggcagcttctcacggggagctgacccacgggcaaagctcccagagccacggcacggatcagggttgtccaacacaaaggcatcaggctcctgacaaaggcagcccagaccagaggtccccacaagaggaagtttggggagaggaaatgggggtgtgctggggacactgagccaggcgccctgtgatggcccctcaaccttgcagagcagctgagacgtacacaactctgacacctatggacactctcacagtagagtctgcatgaggggcctggttccaggcctgtgttccagacccttgggccagtcctgcccccaccgggccagaacctcagggcagtctatacttttttttcttttctttaagatggactctcactgtcacctgggctgcttggctcactgcaacctccacctcctgggttcaagcaattctcgtgcctcagcctcctgagtagctgggattacaggcgagcaccaccatgcccggctaatttttgtatttttagtagagacggggtttcaccatgttggccaggctggtctcagactcctgacctcaagtgatgtgcccgccttggcctcccaaagtgctgggattacaggtgtgagccaccacacccagccatacacttttagtcttcaaacaaggatggggaagaaaaggcaggagaatgtgcagcagaggccatatggctgtcacgcccagcacacttaccatggggcccttcagggaggtgtttgccgacccctggcctggaccacgtttccagttgtcagcaaaatgccaagtgttcacgcaaagcaagaaagcccttgccccatagtgtccgggcagccaaatctccccccacagcactctctcccttcatgaccaagtccagctgaccaggcctgcaggctcactgggccccaattctgcgtccctgctcatgcattctctcctgttattcctggacccacaagccctgctggctcttcgatgagcctgatgcctccttggggaccttgtcattcccccagtggatgctaagcatctgcttctcagggaactggtcaggcacggtaggaaacacccgattctcatctcacttggcagtggggacatcctggctgtgacctgtgaccccagtccagagccgtgctgtcctcacctgcgttcaaggccctcatcccagctcctccggctgcagcaggtgctgcatggctgcctcatctcacattccctttgctggggtccctgtcaacctccctgggctgcacgggctgggtccacctgccatggtcccagcaatttgcttcctccaaggagcctttcccctcccagggctgggctgggactccttggatggctggggtcgaattggtttctgtgccggcctctgttccctggcctcgccgatcagctgggcttctcccccttgacttgggaccaggtgatgcttgggtgatctcctctggccggctgtgatgtgcaactccagcttggtctatccctggaaatgggggcgctaggcagtggctgttctttgcctcaagtgagatgtggccgctggtggcccccagagtatttttctccaatgaaacgggggttgagatgtgtctcctgcaccagggagttatgtcccatagctgtggtgagccagggcactgcggggtggggataccctgggacctgcttcctgacagtgctggcccgggcccctcctctgaccccagtggagcgtgaggcctgagcggggtgcagcagcatgtacctccatgaacatgacccagaagggatgccaccaagttaggggaagagcagctggagcccaacaaaacatcccacgggggcattccaggtggcgagctctgggggcagccgcagaatccagcccacctgatactgtacacaggtgcagacagggaagggtgccttcctggctgccacctgcctgtgctcagacctgcacctgtggagatgcaggaaggcccatccgagccagaaacgcctgggcatccctccaggcctgacttccaggctatggtaagctcagaggctaaggtggcagctggggctgaatagcggaggtgagggaaagtcatcggcgttgaacattgacaggtgtcagacccagaagatgcaggacggccgaggccctgcaggggaaggcctgggcgcaggtgggtgtgggaaggctgtggccaggctctgctgtgctgttggccatgtctgggcacatcaaggaaggtgggactctagggcataacagctttcctgggattacaatttaaatgagccaaatcttcaagaagctcccgtttccaactgggcccttccagaagccatgtgtctgttttttatgtattaacaaaccccacagctgatgaggctgattcatttccatccactgcacactgagggtctgctgcccggcctccctggggcaccgcctcgacttctcacattcccaaaatgaacaggctgcaggctgcgattttaggacctcagggcctgcggcaggcatcttgttaaatacacctcatgtaactgtgtgcccagggtgaaggaaaggtgtcctggtcaataatgacagccgtccctgaatctggtggaagttctgggccgatcatcctgtttctcatcctaatgagaagctggctgtagtaaagggattgttcccatgtcgaagggaaaacatttcaggtctgagatgcgtaaggccatatgggggcaaaccatgggaccaggcgggagctggggctggcgctggggtcccccaagccttgtgcctgccatgtgatgggctgcccagccctgggccctggtgggcaacggctgcagaaagtttgtttggaaatggttggggtcaccattggcatggtttgcctcgtccaggagaaccacgaggcgggggtgggggcaccctacccatcatcacagtcgccacatcagagggtggggctggtcatgtcattgaaggtgcatccctgaaactgtggccaccttgcctgtggacatctggtctctgttttaaacctttcccttcctaataaccccaaaacaaatgttcttttgaactagagcatgtgagagcagccgggcgtgttggggtggtagggtcaggggctagcattcgtttttaagttagagttagtgtaattcaaatgaaaaaggaaaaccctgcattggctccccacaggggtgtgggtccctcctggcccttgtctcttggggacgtggccagtgggatcatgctggcctgacttgctcagtccttatcttggagatcttgtttaccgggatatggagacttttcagaaaagccacaggactgagattcctgcttctcattctaggctcctaaggattatgcttaatttataaaagctcagaactaggtctttattcagggactctggatgaaggggattagtgaatctggcccctggcagtcttagaatgaattgttcggtgacagaaaacaaacaagcctcagacagatttgaaactgtcaaatcccaaaacactccagtgaggagctgatgaagatgccccagcagtcacccgcatttcagccctctgagcaaacgtgtgttctctctactagatacgtgatgctgaccaggcacagggaaaagggaggggaggtaggtttgtcacctgcctgttaccagagccccccagcccatgagctgactctggaccacgggctgacttcagtgcaggttcccctgatagggggcaggaagcagtgtgccctgtgctagagaaatcttgccactgctctgcatcctcagcaaatcacaagggagtcaccaaatcgaggagtgacacgaccccagcgtccatgccgaggctgggaggcccaggaccacccaggcacctggtggctgagtctcctggaaaataggctctgcactgaagtgacactaggtccactgtccagcgagttcctttgcctgtggccacacaataggcccagagcctgggagccagccccattgaggggcagagtgcccagctgtttgcctgttgactcttcagaaccttctgggggaaagcagcagaccagacctgtggagggctgcatggggctgctccacctcttcagctttcctgggacctgattcatggtctgcttcacatcctctggcatggtccagggaccctgtcagttctcaaccactgctctctccccttatgtgggcttgaagtggtctgtctacttctctggagttgcagtgctactacatcctgtctctgggtgagagagtacaaatgtcactccatttccaaaaggaaaacacacacatctgcagcgccagatgttagaggacagaagccgcgtgtgttagaagcagcggctgttgccagttggccggcctcttggtttaatcttccaaagcggcagtgcagggtgggaagggtgtgcttggaccctggtggactggtcctggcctgcaggctctgagtcacacaccttccaagggctagagtctgaaggtacagccataggtgcctggtagggtgaaggccacagtccccttcatgtgcccaggggcagaggccccaccccaaatcctgcctgacagccggcttcttcctgagcccagcacagggtctgggcactagggcaggtgctcagagaacacttaaagactaaacaaggattttacagatggagaactgaaaacctgggatcactaagcagggtaaagccagcggggacagacccgggatttgaggtgctttgccagggatgttatgataaatgaccatgcacggggggcttaaaacaatggaaacgtatccctgcacagttctggaggctggaagtccaaggtcaggctccttcaggggtctggagaggatcaaatccatggtgtttcttggcttgttccttccttctttacaaggacacaccactggatttagggcccacccgagtccagcatgacctcatcttgattagatctacaaggatcctatttccaaataaggtcccattcacagaactttgggggtcacttttcaacccaatacaactgtaaaggcctgacttttgttccacatggcctttctggagtgtgacgagtgctttttccgaggcgaggccagtcctcccagagacaggtggaggcagcacgaggggcctggagcatttgccgtgcatccactatgtgccccgcacttcgcatgtgcgccatgggatgccctcatggccctagaggcaggggctgtcagcaacgctcggtgtcttcagtccccagctggatcccccagtgtgaccaggctgggccacggctgctggtccctttggggtcttcctgcccacacccttgccccctgttatatctggggttgaggctctggaagctcaaatttgtagccagtttctcttgctcagacgggaggtggatcttctgatgccaccctgggggaggagggtggtgtggatggggccaggtcccagcaggccacaggcgcccacggtggctcagccacctgagtcccgaactgttctccctgacaagggacttctgttgtcccacgctgttctggcaactgggtccctggcagccatggtggggcatcttcctcagttaggtgatgaatagagggccattcccgtgagctggggtttggccttggattgaaggggtgttcacacacaaacgtaattgcacgacatagaaagaagggtattctgtaccccgggtgtccaccacatcctcggcgcagcagtggggcctagaaagcccgctgggagttttctgggcagctgtaggatgctggtgcaagcccggggctgctgcagagaggccgctgggatgacacaggtcgggacagtggtggttctgtgcccacctcacccaatctcatctaacatgattgggacagagttaagatgtgccttagggccaggtgctaggctcctcccaactccaagggattaattaaaagctgggagtgctgcttttaattgttgggggagctgtgtccagcagcaggcgagcaataccccccgatgtgcttgctgctgtgaaagggggaacctgagtctatctggggcctgcggtccggctgcccacagccacagtgactgccagtctcccactccacaccagccctgggtggggaggtgtagccaaagggctcacactgctcccttctccttctagtgccccacagggcacagggcagcctcttggggaatgggtgatttccgggccttaaagggaggcagttcctgcccaccacaaaggggtcctgagggtcaggaatgcagccagaggctctgctcatctgcaaccccccatccaggcagccccagctgagaccaaacaggggtccggccagcttcacggtcatgacgatgtgaacacaggtcagggaagaaacacaggacacgctggggaatcacagacagaagccaagcagaaagaacagacagatgaatgtgctccagggcggcagggctcctcgggcaggacccagcaggagaagccaacaaggctttgcgacacatttgagacttcacggcatcacaaaggatgtttctgttccacaggggggtgatgggcagggggctgagacagacactgggcctcccttacccttcttcttccggaccgaggcttgcaaacagaaaggggaccgccatgagccaccaggatgcagcgcccgcccgcagcctacactcgggccttgtcagctcagggcgcctcaggagcaggctgggccggcaatggggcggcaggcaggggctgtctggaacgctgcgaacgcaggctgcgctatccatggagtggctttccccaaaccttggctgcccgcacaactctgtcctgtctgccctgctcgttaacctactgcctggcagtggaaaggggctttccttcttcctcagcaccccttgtcccaccagcaccctgccaaagtagggaggagttctcagagcagacatgagcagaggtggcggggccagcctttagagtgcacctgtggcctttcctgcctcattctgttgtttcttgactgagctgagctctcaggagcaccccttgcaaagatgagagctgctaggcttgtccctctggggagccccaggacaggcctctgtggagagggcctggaggctggtcacctcctccgtcgcctgtgaggctggggcacgcggggcactactggttctgggtgggtggggcagcgccactgcagggctgctgttttggactgaggcctcatgcccatcctcagactctagccccagaacctcgtgagaagcggcctggccggcctcagcgccctgggccgaggaaggatgacatcactgctgtggcagcacttagcacttgctagactcctctcgggaaagctgcctgtgccagagtgcagggaggacggggcctgtgagtgagagcaccagccagggcttggctctcaaccccccaggccagctggactggaccgtgggccttgggcgggggctcgtttctgcgcccatgtaagctgccttcaccagctccaatttgtgctccagtggagcaagcgtttccacctacatgccatctctgtgtgtttcagagccaccctctttccaaaggtgtccctggctccatggtgactccccggaacaaacaggatcctgcatggccagcatggcccacgtggctgctagtcgcccttcccctgcctacaagatggagtcagagggccagagcctctctctgttgcttgcagaccttacacaaaggtgccgggcgttccctaagcctgctgtgcagaccagactgctctgccaagcccacgctatctacacacagatccccggaggatggagccttctggtctgagccacgtggggagcagctcacacaggcctccgaggcctgggctgaggtggatgtcagtgggggtgccctagacagcagggggagctgctttggggacccagtggggctgcttacctttatccactagtgagaggcccaaaaattcaaaacaaaacaatgttagataaacagaaaagaggaaaggcaggactagcaacaacgccccgcgaggctccgagggaggtgcacacatggggctgcggggcatgcaggggcatttcctgatgcacgtctgggtacaggggcaggaggggggtagcgagcaagcgtggggtcatgcacagcctggtgctttgcaaagggcagctcagggaccggcatggtgactgtacagggctgggccgggtgtgcgacttaccgagctcctccagctccgaggtcatggacttggagcgcagggtgagggctgtggtcggtgcccgctttggaggcgggggagctggagggcagaggagagatgggtgtgagaccccagcccatgtttccagatatgggaataaggctagcagtggccctgtggctggcaggtgggtctcaggctgtttggctgcggtggtcagggattgtgcaggtgtgcttatgatgggaaaggacaggtgctcaggaggatcttgccatatccctgaactgcagtgcaggccctcatgggtgggcctgggcagggggagggaggggacagggcactgagtgggaagcctgcggaagggacgcctgctagtgactaaaagggcactcctggtgggacatggatgattccggcagcgtgtgagccccaagtcattgtcgtgggctctggcggtaaattccagcctcacccctgtgcctgggctctcagaagtgtgggatcagctggagagagggcccactgccccccagctgtcctgcccgcccccaccccccccccccagtagggccccaggctggagctgggcgatgtggggcatgtacctttcttcctggcggtgtcgtcggggtccagattcctggtcaccgtgaccaccttaaggaccaggtgattccctccctgccggatcatgttcaccacctgcctgtggccgactttgacaacattctcattgttaacctgtgggaaggcggagaggatggcatcagtgagagccagcggagaggaagacagttggcacccacccaaggcagagacatgtgggctcctaaaaagggggcaaatgcagggaagcaaagggagtgagaccgtcatctttttggaagcaaaggtgcttttggggaaaccagaatgaatgctgctgtgactgtggaggtcacttaactgtggctcaggaggttgggggaggccttcctctgacactgcagctctctgctgagtcctccacagctgctgcagaggaagggctgatttctatttaacctgagcatccttaggtgcttacttttacaggcctggggcaattttcagggccaccaagagactgcatgtgaagagcctgacaggcgagttccagggctgggctgcagtgccaggctttgcatcctcacaggaggaggaaacgtggcgcttaattgcttctcatgtattctgggaatgcacatcacactgaagcagcccctttcctcccactccctccctccctgctctcccgctccagaggcctgggaaggcagaaaagcctggcccagcagggtgcttacaagagtgggggccctgtccctgtgctggtctgtacaactagctgccccagtgctcctgggacggtgagtggcaggctggggacccccaaggctgccatgctatggccactgccctgcagttgaggaactcttaggagccggttacctcctgccctatttgtcctcaccatggcaaatgcacctgacacggaagtaggaacggactcagggtgccatccccctggcccctctgctattctcacctccctgagcaatgctcagcagcagatggccttggcctctgcctcccagccccacgctactcccagaggaaaacccgagtgatggagactggaactgggtgggcgtctgggctgacactgcccaccctggctactgcaggagtaacacttagtggttttcaaatgttgctgtgaaaaggccccggcctcacccctgcccatggaactgagctccacagggggcctctggcaccttcatcccagcagctcctgaatgggagcgcagcccagaggcagctgtctctaggtggcagcagggagggggaagccccagaaggtgaagtttacagctgcttcacacgccaccttcgaacaaagaaaagcaccctgatcgtaaacaacagccaagacgtcatgcccctcaccagccacactgtgctgtacgcatatcctcctgctatagattcttcaaaaactaaacatctggtatacccacaaacagaaaacttaaagcctgtgtgctgcttggtggattttcacaaatccaacatccctgtaagagctggatagaagcaggtactgcctggctcaccatactgttgacaggcccagtgcctggctccccatactgttgacaggcccaggatgtgccagttttggtcacctacgagacggctgcagaggtcctccaggcagggctgcgaggagcccagggaggactcagtggggccagggcagtccccgtgccagctgctctgcagtctctgctgtgggaccggctcattcccatgtactcagacccacccggtttcagcagtgagtatccagtgtcctgggtccactggacagctggtcaccctgcactgccctgaagatagagtcttgggagcaggactatcctaatggggccttgggagagaggcccacctacagcggcagcggtctttgcaaggtgactcctgggggctgttcctttcactgaggttctcagaatgtaattaggaaagcagatggatttaggaagtaaaggagccggatcgaggaagacagcaccgggagttctcggagggcagacctcagcttgcaggaccctcgctgctctggtacagacaggcaaccgaacaccagccacgcgttatcgggttctctcccctcccatgagcacacccgggtagtggctgttgctcattcattcattcattcactcattccagtgtttctgttccccgtaccactaaaagccatgaggcacaggcagttcagctgtctctgcctccatctgtgggaagtttgcgtcctcatcagggagttttggccgacacacaaagaagtgaacacataacttcaggtggctgagtaccacctaagaaggcagaaccaagtaaaaggagactgaacagaggcctggacccaccaggaaagagcagtgtgggcggagtcatggagtgggaatgggcaaggaagcggtaggcaggggggcgcagaaaaggccaaggcctgagagcagggccttggatgccagggtgaagttatgggccagggagtgctgaggcccgatgcagagatgaggcatctgacccgagcagctgtgagtatgaggtgccaaacacacgtgggggggcaccgagacactggggtctcaagctgagatggaggaggcaggctgcccaggctcaggagccgcgaggccaatgtgtgaggccttggtgagaagacctggcagtagggagcccccagctgcctggccactagatccccaggggtcatcccttgcaaggctgtggggagcgaggggaggactcggccccaccttgagatgggctgggaccagctttcctgctctgggcgggcccccagtgccgggccttgagggggctccaaccaagaaagtgcatattactgcctgcttgctcctgccacccgctgtggggcattctctggatctgatgcttggggagagtacgagactggcacggggatgggctgccagtcactggagaagccaagctcaagttgcggcctcctgagggctcgtcgggctgatggggactttaacagcctggccacttaggcagggaggggctggggatgtggcctctgactgcagcctgctaaccatcacggccttgggctcactccctagaatcctcatcctccagaatctcccgtggttcatttgtggtggctggatgctgtccttctgtgatcttggccagagctggcccttggccgctttgggagaagcagtttgttcctgtgccttggaagggtcaaggggctggagggcccttttcctcagaagtgtcagagacagacattactcttttctgggcaggggaggcaaaggaccaaagaaaggcctctcggggaatgagccactcatgggggattctcaggaagcttggctgcggggccaaggaccttggcggccccagcaccttccttgtctgtagccgacagcctgggtgcacgttctggtggcacctccacacactcatgctgccccagccagagctgctcctgcacagggccaggctggctgcccagatttgatgtctcatatctgagtctgcagaagctgctgttcccacccaactcctaatcagggctccccagttcctgattccatcccctgtacccctcgtagacctgctgccctcagcagactgcagcaaatggcaggacctgctcaggagagctcagaggaaatgaggctcccatgggccctggaaacatcacttggccttctctgaaagctgatgacaaagaggcatacagggcttgcaggggtggagctaggtttggaatcagttgttgggcatctgatgcccctctgacgtccagaatctgtctcgcccaggtctttcggggtcatgagccacttccaaacaaagttgctttggacgagcttccctgcagtcccagctccacttggagggccctccctcctgcttcatggagggatggtatccggtgagccctggtcctggtgggcctgcacccctccagaatcagcatattattgggtccggagcctgtgggggccctgctgcttgctgggtgcccgtgggcaggacacctgcctctctagcggggtgtcctcagtaaacagcatggcttcctgccctggcaagcacttgggggcagggaggtggtgccaacagggcctcaaaccatccacacacatcctaggatgttccctttggtccccatccagcgattaccaagggtcaaatcccacccacacagtgcctcagtcagttttaacttagctgtcacaatttaaagagtataagacctttgcatagaaagtctagaatttcagttttcattgaaaaattagaaccctcgcacttggggagttgggcctcccacttgcatgcggcatcctcccctgctgttagctgaggctgtgactgctgctgtgcccgcccgccccagcctcctgggccctgacgtcaccttctcagcttgagggggcattggatttgtggctcttgccagccaccagtgaaacagaaaactgctatcactgcctttgatgccatctgcgtttagaattttgggaagggacagattgaactctgcacattgctggtctcaaaatcagcctgggtgacattcatgaaactgatttctatttcctacgggagccacaggtgactggtgagccctgtatcaatataagcttcccaggccagtctcctgtgtcagagctcagatctcaaaacacattgaccttctgcccagaatctttcccctgcagagggagagggatgtctgtgaggggcctgcaacagcctttctgagcatgaggaggaggcagaatgggggaatgtcatgtgggcgctggggcagaggcaggtggccatcccgtctgtcaccactccgcattaccctgaaccctagatgcaggcccagtggacagacacggacatgaggtctggaggggcctgtgggggaccccaactcaaacttgggcttgcaaaagccaggaaagtggccccgaatcttgcacttaatatagaaaccacatcgtttccatcaatgaagagccagttccagcaccaagcatgtggtcccagtgacgcgcgtttgtaattagaccctaaataccatcaagacactaaaaatgccgacttccccaaagcagctggggctgggaggaacccgcaagagcggggcttgtgattttttggagtgtttagaggctctgcaaatgaactcagaccggtagtaactcctgcaacgcacatttgctttgcacccctccagggtatggtttagattctgccgagagggcacaggccgtgacagtgtgccacaggaacctctatcatacaggcccaggacaggaagaccccttggtgagaacctggccgcactgacagcctgtgcccggctctgacctcaggcaatgagagcctgcctactgggaacgccacagggcaccagggctcatgggggtggatggtgcccacgtgctgctgggcacacacctgccctgtccccctcagctgagcacagagaacccatcccaaccttccgcccacactgacctttcccgacagaatgctcagcacccctccccacatcccatccctccagcttcccctaaggccaccatcagggctaagtcctggggcggggcagagtctgccccctgccctactttgcctactggtgcatcatctctgtgtccccagacacttgttctggactgaactgtgtcctgcccaaatttatatgctggagtcctaatccctagtatctcaaaatatgaccttactttgcagatacagtcaagttaaaaaggggccattagggtgagcctaacccaggtgactagtgttcttatgaaaaggggaaatttgggccaggtgtggcagctcacacttgtaatcccagcactccgggaggttgaggtgggtgggttgctcaagcacaagtttcagaccagcctgggcaacatagtgagaccccatttctacaaaaaatacaagttagccaggtgtactggtgtgtgcctgtggtcccagctacttgggaggctgaggcaggaggatcacctgagctctggaggtcgagactgcaatgagccatgattgtgctactgcactccagtctgggcaacagagtgagaccctgtctcaaaagaaagagagtcgggggagtctggatatagagatatgcacacagggagaaggcgccatgaagggtgagatcagggtgatgctttgagatgctaaaggttgccaggaaaccgtcagctcctatgggagaggcctggaagattttccctcacagccttagagggaacccatgctactgccaccttgatctcaaacttcttgtctccagagctgtgggacagtccctgtctggttgaagctgcccacctgcagtgcttggtcaccaggcctgtgccttgcccggccttcttggttaccaccctgaggactgttctattgcagccctcagccacagtgcatctctgtctgctgcccactgaggctcacctgcccctgcagcaccagctgttgcccatgcagtggcacaggtctccagcgctgcccaatgtgagcagacactgattgggccacagtcttggctcttggtcccacgacctcccccaggggcccagtgtggggacactggctattggtctcagagcaaaaatggcctcaagtcccatttatcccattgagggggggctcccagcatggagctctgcactcttccttgcaggagctcagagcacggccagctggcatgtagctctgagtcttcagcattggtgtagccttcgggtcagctttcctcagctcccctgccccctcaccctgtctttcagctctgactcagcccaccctgctggccacgacttgaagctggggacttgcagtggctgcatgtctatgtccccccagtctatgtgttgaaaccctcaccgccagtgtgatggggttgggaggcggggactctgggaagtgattacatcatgaggcggagccttcgtgaatgggattagtgcccttataaaagggaccctggagcaaccctttgccctttctgtcctgtgaagagaagatggctttctgcaaaccagtttgccggccagtgccatgatcttggacttctggtctcccgagctgggagaaataagtgctgtttaagccacctgatctgtgtattctgtcgcggcagcccaaacggactaagaactcaagtgacaaaccatagctgtgcttacttacccaggagcctggccacagctgtttccgtctcccatcccctgcaattacatatattgtaccaggcttgagatggggagggaggaggtgtcttggccagcaggtgacccaggagtgactggtcttaaagggaagctgggaggcagggactggaggagcagaccctggggccgcagttcacccagacctgcagagatggcagaggcagctctggcatgcaaaggccacagcccccagatgctgctgctgttagcaaacctggggccaaggttggtggctggggcatcttaaaggtcctgggggaaggggtgttgtgagtgggaactcagaggcactgtcattggaaaatgactgccgcagccctgggagggagtgggcagtgcaggctggaggccacagccctcccgcgctcatgcttgtagcagagcttttgcccttccccaccccacagaggtcctattgaaactgtcccctttagcagggctaactggggcatgtaatgtgggtccctgagaagagattgtctttcctgcctctgccagcgccaccacccccaagtttctgccactggacccagctgtctgtgaggcctctggatacagatcctgtccctcctttccctgctcctcctctgtccaggagctgggggaacctgtctgcaggaagagggtgtcctccaggatgggcccatgtcactgtcttctacctttagaggaagtgtctctgccttgtgcgagtcatagcacagtgagtcctaggggttcctggagtcctccctaggctgggcacacaaagggtggagcccatgctcccagctgccttcccctttcctggtgaagaggaagtgtgactccattttccggacagaagctgcgcagccacatgaagtggcagcacctactccttgctgcctcagagccagccccaaccaaagaggctgcgccaacctcccgtcgaccatgctggtcttaagttctcatcctattctgcaaaataaacaagctttggatgaagtccttccccaaaagtaagaaacataccaaggacaaagctgtgcgtcgtgtggctttgggtttttgtgcacctgctccccgtgtgaaggtgagcactttgacaacaaggctcaaggatgccaacggagtgtgccccagcgcccatcaacacttctatgggaagagtggggcaaaggcacatggctggcaactcaactcaacgtgaaattaattgacaagaccagcacgcaacaaggcaggactggatacttcagttacatttccctacccagttcagcagggacagaggaaaaaaagctttaggatctttagaatttcccagcctttaaacaaacctaaaatcagtttaacctgcaatgagactttggaaccagctacagtccttaaaacagatgccagaaattgctcatgtggtgacagaaactgcagaataggtgaaatgcttgctgtttcctcatatgctcaggttggcatcttgagcttccatggggtttcggtgcccctcaaaaaacctggacctgcaattctggaatgctgccaccaggggaaggtatggcttgatcacttgccagatttatagaaggctcaggtaagtactgcagctcctggggataactgccttggagtagagagaaactgttgagaaatcatggatccagataactccaaaaaaagagtaatgtgcctgtccatgcatcacccttacatacagacatggagacatttacagagtgagtgaatcacagccacatccaggtagatggcaagaacccaagcctatcatcagccacagtccagggaatttctgtgaagaatgggcatacctgccttcctttgtaaataattctcttcttccacttaaatcgttatttaaaatatcaaaagttgtacatacacatacacagagtttacagaaacaaagagttccacaaggattgtcatgatgaaaccccaccaacccagccttacttctcactctgagccttcagctatttaattttatatctatcactcaatctctgaacacctatttttgctacttgatatttacattttcgatattatccgctgacacactgtgatggaaaaggatgacttggctcagagtttgtgaaatgtggcactatggtgattttggaccaattaattctttgttgtgggtgtgcactgtaggatgtttagcagtgtccctgaattctacctgccagctgccagcaataatctccacccccaagcgtgaaaatcaagaatgtttccagatactgccaaatgtcctatggaaggtcaagacaccatcagttgagaaccactaatttggctctttttaaaaaatcctccctccccactgttttcccagtaccaccatcctctagatgtattgatatcaaaattttaactagatcaccattcaggatttacatcatgactatgtaaaatctattcatagcttaaactctatagtatactatggttacttcatcttttcctgtacattttgttctccctagagcaaaataattttgtttgttggtcggtttttctatgtacttaacagtaattcaaatccaaatgcttccctaattatgtaaatctcttttcagagtcttcaaatacattatccattttaagtttgtcttcctgaagaaatatttcctgaagacttttgatctgcactgaacaaccaggattaagtgttttctagcagctgtccccattactctaatcctcaggattcctttgactgattctttcctgtgttggatctcctgaatccctgtatttgtttatttggttcaaaaacctcattttttgtaaaggacatcctccagtatcttctccccaaatagagttaggacataatttttttgagacattgactatttgaaaatggctttatctgtacacttaattggtagtttggctgggtataaaatttgaggttggggaataaggtaaagtaaattcctaagactaactaactcttctgcaggtaatagctataaaatctagacagagtacaatccccacccccaaaccaacaaataaattctctgaaggttctgaagagtgaacaaagacaggcagattttagatgagagttgaaaattagaagctttgtgcaatggatgcattatggtatgagtcacctgcagttttttgttttttttttttaaatccagatcctgcacaaacctgcagttctgatagaaatcagaggatacagcccacagtggccatagcagccaaagtgaggggagaactccagaaaagagagagccagagaagggtagtttcatattctgtgtgtaaacttctcataggtctttggttgatgtctgagctgagctgtgtgtgtaaggaagactcaaataggcttgctatgataaggctgaaatttgagctgctgccactgcagggcagacaaaggttgcaatttgagtttaaccaaactcattatcagctaaaacaaaaacattaacacccatcaaaggaatgtaatataatccagagttgccaaagcataacattcacgaaatttgggatacaactcaaacttatttagcaaacccagagatgacccagatgttggaattatcagagaaggactttaaaaaacagctactgtaacaatacccaactaggtaaaggaaaataggcttataatgaataaaagacaggaaatcccaaggaaattttaaaaagaattatatggaattgttagaaatgcatcagctgggcttaacatcagcatggatatgacagagctaattattagtgaatttgaagacatgccaagagaacatatccaatccaaagaagagagaaaaaaagattttaaaaagtagaacagagagtattaaggatcaaaaggtctaacataacgtgaacgagagtctcagaaggggggaaaattagagtcaaagaagacagagaaaatgagtcataaaaaatacttgaaaaaatggtacccaaggaattccccaattaggtgaaggacataaatttatagattcaagaagcctgtgaatccccaaaaagataagtatttaaaaaattatatagggacattatagtcaattctgctcaaagccaaagacaaggtgagaatcttaaagcagccagagaaattatttacattattcacactctaaataaaaatgactgaatgattgcagactttgcatcagaaaccatggagaagaacctcttgtagaagacggcggaacaacatctttaacaggtgaaagtaaaaaaaacacaactagaattccatttctggtgaaaattctttaaagaatacaggcaaaataaagacctttataaaaaaatgaaaaccaggttatttgttgccagaaagcctgcactaaagaacgttcttcaagctgaagtgaagcgggactggatctatggatggcacaaagggtgccacaaatggtgaacacctggatacaaaataaaagatgattctccctcttaattttaaaagcagatatcactgttttaggcaaaaataatactgattttggggtttacaagtgtgtagatgtaacacacatgacaattatagaataaagtgaggcaggagtgaagaagatgcatctatatggttgctgggtttttatattttacatggagtgtacaatttgaactctaagtagactatggaaagctaagaatgtatactgtaatccttgatccactgctaaaagaatgtgaagagctacagtgtaacgccaatggaaaaattaaaataaggttctaagaatagttaaataatctaaaataaggcagaaaaagggaaaaataaaaactgaggagataaacagaagacaaacttgtaaacctagatggaaccacatgaacaattctattaaatgttaaatagaataaaactccaactaaacatcaggccttataaaatggtttaaaaagaagacctaattatgctgtccgtacactttcaatacaaagacactgagaggctgagagttaataaatgagaaaagacagttcctgggcagaatggctgttaatatcagacaaaataaatttttgacacagggtcttgctctgtcgcccaggctggagtgcagtggtgtgatcgtgactcactgcagctttgacttcccaggctcaggtgattctcccacctcagcctcccaagtagctgagaccacagatgcatgtcactatgcctaatgattttgtattctgtgtagaaatgtggtttcaccatgttgcccaggctggtcttgaactcctgggttcaagtgatctgcccaccttggcctcccaaagtgctgggactacaggcatgaaccactgcgcctggccattcaatgactttttaaatatttcttttattttctctttgaggtatccttattttatacacagtagaccgtctggactgaccttctaattttattatcttcttcgaaggccatatctttttcttttctgagaaattcttttcaagtttatctttcaatctatctttcaaatttttaatgccagcccggagcggtggctcatgtctataatcccagcactctgggaagctggggtgggacgattgcttgaagccaggagtttgagacctgctgggcagcatagtgagacctcgttccttgaaaaaaaaaaaaaaaaaaaaaaacatttaaaagttagccaagtatggcagcacgtggctgtggttccagctattcaggaggctgaggtgggaggatcccttgaggctgaggctgcagcaagtcctgatcacaccactgcactccagcctgggcaacagagcgagacctgtctcaaaaaaattttttttatacctgctatataatatttttaattttcaggaactcttattttgttctctgatcatttcagaaagaacattttactttttttttctttgatctcactgagcatattaataatacatttcttaatcttactcttcctgcatactggtttcttcagttgttttcagtgtgtttgttttgggccgtatttcatattagttcatcaaatgtctgatgttccttggaaggcagctcatatttcagagtagctcctaaaagactaagttcgatcacagccaattattttgtgaatactgacaaatggatcctaaagtttatatggaaagctaagaggcccaaaatagccaacacaatatcgaaggaggacaaagtcacagggctgacactccccaacttcaagagttactatacagctacagtaatcaaggcagcggggtactggtgaaagaacagacaaatagaccaatgatcagaatagaaagcccagaaatagacccacacaaatagagtcaactgatctttgacaaaggagcaaaggcagttccatggagaaaggacagtcttttcaacaagccatgctggacatccacatgcaaaaatgaatgtagagacagacctgaaatctttcacaaaaattaacccccagtggatcacggacttaaatgtaaaaagcaaaactatgacacttctagaagataagagaagatctagatgaccttgagtttggtgatgatttcttagatacaacaccaaaagcataatctataaaagtcaaaattgatgttggacttccttaaattaactctgcaaaatgcactctgaagagaataaaaagataaaccacagactgggggaaaatctttgcaaaacaaacacttatcagataaaggactggtatttgaaatacaaaaagaaagaactcttacatctcaacagtaagaaaacaactgaatataaaaatggggctgggcatggtggctcatgcttgtaatcccagcactttggggggccgagtcgggtggatcacctgagtgaggtcaggagttcaagaccagcctggccaacatggtgaaaccccgtctcttataaaagtacaaaaatcagccgggcatggtggcacacatctgtaatcccagctacttgggaggctgaggcaggagaatcgcttgaacctgggaggtggaggttgctgtgagtccagatggtgccactgcactccagcctgggcaacagagtgaaaaaaagggcaaaatatctgaatagacaactcaccaaagaagatacacagatggcaaataaatgctccacatcatgtggaattagcaaatcaagccaacagtgagacaccactacacacctatggaatggccagaatctcaaacaccgacaacagcaaatgccggcgaggatgtgcagcaaccggaatgcttatcgttgctggtgggaacccaaaataacacaggcactttggaagacagtttggcagtttcttacaaaacaacacacttttaccctatgatccagcaattgtgctcctttgtatttacccaaatgagttgagaacaggttcatacaaaaacctgtatgccgaggtttagagcagctttattaataattgccaaacttggaagcaacccagatgtcttttgagaggtgagtggacaaacacactggtccatctagaaaacggaatattagttagcactaaaaagaaatgagctaccaagccatgggaaggcctgcaggaagcttacaagcatgttgctaagtgaaagaagccaatctgaaaaggctgcacactgtatgattccaactacatgacattctagaaaaggcaaactatggagaaggtaaaaagatcagtggttgccaagggctcagggggagggaaggaaggtggaacagaagcacagagaatttttgaggcagtgaggctgttctgtttgatactataatggtaggtacaggatattatacatttggcaaaacccacagaatgtacaccaagagtgaaccctcatgtagactacgggctttagttaataatggtgtatcaatattggcttctcaactgtgtgggacatttgctacaattgacaagccaattgaaaaatagggaaaacagggagagatataagggggtatgtggcaagtcggtacttttcactcatttttccccataaactcctcaaaatataaagtctactaattaaaaagaggctcatttctacaagtttttattatggaagaagcccaatgttacatgacagtagagagatgagtaccctgagccagtgctgtccctttagccagcgtcagccactgctggctccgagagcacccacccagcccctggggcgatcatatccctctgcgttccctggaaatggctcagcatgctttctatgaaaagacagagactcttattaagaagaaacacaactgaagtgggaggattgctcgagcctgggagattagctgcagttagctgggatcacaccactgtactccagcctgagcaacagagaacctgtctcaaacaaaacaaaaaccaaaaaccacaatgccattctcatgcctaaaaagcgactgcattcctggtatcatgaggcaccgcgtcatggctcaggctccctgagtgtacagctggtttacttgactcatgagcaagatgcacacgtcacatctggctggcacgtctctgaagcctttttacatctctaggctttccccattcctcttttatccctttgcagttcatttgctgaagaaaccgagtcaattgcatcctgcggcattgcttctattagtggtggtcagaggcgggattgcatccaggagccctttgcaggcggtgccgggcatacccacgccaggagccccggcacagctgcttgggtctttctgcgacgagacagcaccggtgggtcaagcaccctcagcctgtcccactccccgtcagcttgccacttagtgtttttagcagccactggtaaatgccatgcccagatccttcacctcctgggagctgcagaacgctgatgttcaacttctgttgctccttctccacttactagttggaataatttttattttaacttcttgagacagggtcttgctctgtcacccaggctggagtgcagcggcatgatcttagctcactgcagccttgacctcctgggctcaagcgatcctcccacctcagcctcttgagcagctgaaaccacaggtgtgtgccaccacactgggctaatttttgtatttttttgtagagatggggtcttcctgtgttggccaggctggtcttgaactcctgggctcaagtgatacacctgggcctcccaaagtgctaggatcataggcatgagcactgcacccagccacactaatttttaagaagaaactttcccttttcaacacttggatgactctgaggcacagtgtatgtgagaaggcccagatacgggccggatactcgcctttcatcagttttcatgtgaatgagtcacttctttcaagtgaccagttctttaaaaagtgtcattatgggcggggcatggtggctcacgcctgtaatcccagcactttgggaagcaggtggaccatctgaggtcaggagttcgagaccagcctgaccaacatggagaaaccctatctctactaaaaatataaaattagctcgacgtggtagtgcatgcctgtaaacccagctactcgggaggctgaggcaggagaatcgcttgaacccaggaggcggaggttgccataagccgagatcgcaccattgcactccagcctgggcaacaagagtgaaactccgtctcaaaaaaaaacaaaaagtgccattatgaactcaagaatgtttataagaacatagctgataaaagtttgaatccactacaattactattgtttttattttattttattgaaacggggtcttattctgttacctgggctggagtgcagtggcatgatctcagctcactgcagccttgatctcctgggctcgagtgattctctcatctcggcctcccaagtagctgggacccaggaccacaggcatgcaccaccatgcctaatttttttttttttttttttttttttaaaggcaaggtctcaccatgttgcccaggctggtctcaaactcctgggctcaagcaatctgcctgcctcagcctcccaaagtgttgggatgacaggcgtaagccaccacgcctggtctagtctttgtttttaaacaaatcttttattttagaatagttttagatttacaaaaaacattgtgaactcagtatctggagttcccatacactccacactgtttcccctattattagcatctcacactggtatgggacatttgtcacaattaataaaccagtattgatatatttcattaactaaagcccacattttattcggatttctctaatttttacctgacgtcccttgtctgtcccaggatctgtccagagcaccacattacgtttagttgctgctctaggctctgcctgctgggatggtttcttagactttgttttgttgaccttgacagttttggctgctggtcaggtcttttgttctacccctgaattaagattttttttcctcattattagactgaggtatatatgggtgttcaggaggtaaagagccattcctgtcacatagtatcgagggcacacactgtcaccaagacttttcgctgttggtgctggccctgctcgcctggccaagggagggctcactgggctcccccgctgtgaagttactctcctttccctactttccacacagtgctctcgaaagcaagtcactgcatactgcccacacctaaggggtggggagttacacaccacctccttgaggacagagtatctttgcacatgttagggaagatttgtctattcctccctttatctttcagttgtttatttatcagtgtggacccatgaatactcatgttgtactttgaatgataaccaaatgtgactttattttctagctcaaattgtcccggccgtggtctttgggagctccttggcctctgggagctccctgggatttgctccagccttttgttttttgaccacttccttcctttccggttctacaggatgctctaggctgctaccttttgccgtgctttcgaatcctccactgtgctgtatgagcagcccttcctcacactggctcctgagcccatcacatgtgactttgtgtcttcaataccttccttgcttttggatgtgacaaaatattctaccctcttcatgattatactgatagcttcaacagaaatttaggatgatgctgtttttacttattttcttttatattggtgtctctttctctttgctgaaaatctaggttcctaatgactgccattaaggtcatgatctatttgctctatcatttattaatcatctatccatctatcattactttcagactaacaccaccaatgtcattactcataacaggattaccgaaaagaggttatgatttctttccagtttgcaatgacatgcaaattgccacttgacataatttgttaatgccattaatttaattagcagttatgttcatttctattattttgttttggattttgagatttttgaaattttgactgttttacaattacgtgaaatatttactcaattccaaaattgaacctgctactctctctcttctacttcctcttcttgtattctcccccttgaggcaatgctaaattaaaacaagttattttggtggattatccttccattaaaaaggagaaatgagcagatacctgtgtgtttctgtatgtgtatgtgtgtgtgcacgtgagcatgtgtgtgggtgagtgtgagcatgtgtgtgggtgagtgtgcacgtgtgtgtgcacattccctccccaccttccttgggtaaacagcagcacgctggtcacattcttctcgccttgcctttcccacgtaacaacaccccctggagacggtgccacggcagctcccagagacgctccctgcacctgactgcagccacatgtcctcgctgcaaggctgttacgcggcacacactgcaggctcctactggtgggtctggtgcttagtgttctgctctccaaacagagctgaaaacagccacgtgagtccttgttctaattttccgagtgcacctttgggctatgttcacatctgtggggttgctggctctaacggtttcttatccaaactacccatcagcccttagcccaggctacctccacctcctaggcagaggccacagcctcttgcagttccgccacgtgattctgactgtaccagctttccccaccacagccccgctccagctttctgaggcctttgagtccacttgctgtgcagccgccatcgccgtttctgctctgtccttgttggtctctgcctctttaaggatggcttatcctgctgcgtgcatggctgaatgcacggcttaacctctatctagatttgattgattggcagtgtccctcttttgctggacgttgccaatcaaacctctaaaaattcatttattcttgaaaaagatacaagaaagtaccaaaggggtggccacagcatggctgtccaggcacgggcgccctcccagggcagccacacttctgcacgtgcagggttctcattaattcttagcttgtctccagccatggcttattcaaaccccgatcttatttcctcctttgactagaaagctctctggtggtaccccctctatcgtctctcatcctacccagggcctccgagtccctgctggctcaggctttgaaagcccaggccccttacccggctccagctccgcgggctggccggccacctgctcacactgtctaagctttttcaaggctgtccttggcatccattcggaccgtgtcccagtccctcagttattgcagccatcagagggggagaggaaagaaggaagagaagggcactgcccccacctccaaccaggcggcatcatttgagactcgtgcagaagggaagccgccccaagccagccaggcatttgggcccctaaatgccacagctcctctcttagcggccacagttgccccggcaacgtgcggccgcgggcaggctaccttcactgaggcctccctccagacccgcagctccaatccacaccctctttgaaaaatgtttacacacagtgccacgaggtctccggcagagggcttgcgggtgcaaggaaacccacaggcccacacctgcaatgctggtgtgggtgtggaggggcagctgcttgtctcctgctcctccccgagcatcaaagcacgcgggtggcacagcagggtgtgcttctgcatctgcccgggccagctggctgctgtgtgcacaccgggaggcctctctgtccagagcaccaggaggaggctggcctcacacctcaatgcgactggttacaaatacagattcccagccctcacagcagcaggtgctctataaatactattgagcagttctctttgggactgtggtaaaacacagcagggtaggaatgcctgggttcaagtctcagctgccccactgtcaggtgagtttgtgacctcagagcagggctctggccctcatcagctctatctgcagcaggggagcagcagttctggcagtctatccatgagaatgcctgaggacgggtgtgtgactggaaggggggatgcagaggccctgctctgctggggaggatccccggtgctgccccgaagccctgtactgcagcccggctttcccacctaagcaggctttgtctatggtcctgccccctccctggctgtccttcccatgtaccctgtgcagcagccggtcctggagggcagtgttcaccgcttcctgtgtcaggaggcgctcgctgctggggctgggctgtgcacgaatcaggggctgtacgggattctcagtccactatcttgttctcaacaagaatatccataatttcagttcaaagcagtggaagagcatcatatggaggcagagtcggagagctggggtagcttcctctgacagcacccttcatcctgctgtgtccttcagctgtcctccctcccctgtgctgctccgcacggccactgcatgctggcttcaaggcccctgtcaggggtcagggcccaggctgaatacctggcacatgagggggcctggccatatttgcagcgtgactagcaagggaatattaacagccagtgtcaactgagcactgacgacatggctgcccctgggctaaggacttcacatagttacaccattcagtcctcactagcaccctatggaccaggtggcgacgggatcccattttacagatgagggacagaagctacagcggagccctgggtcctcccctctctaccaggagagtaaccaagagcagtcccaccccctggggggcagtgcagctgtgaatgccaccatcggagatgggaaagcaccaggggcagctgtgtcgctcacatccacgctcgccttaccagcgtggatgcacagagtcccagggagcctggagaaaggtatggactatcttcaacttaatctggtggtgacacccactgaggttgctgttcccaatgtgctatctttaccggagcaaatcggtacaaccccagacactcggatgcagctaagaccttgtgaattcctttgctccacattgatctgcaaggagtactagtaggagtctgctttcacctgacaacaccagtggtccacatgcacagcccgtcctcaggctaccccgagcctcctgctctctgccatgccggggccctcagagatcccatcagctcagctttccagaaaacatcatgctgtccacgatactgatgacattacggtaactagatcatgagcaggaagtagcaaatgcttcggatgccttctatgcaaagaagggtgggggaagcccacagagatgcaggggcctgccagttcagtgagggttctgcgtcctcagtgctctggaacatgttgagatagcccctccaaggggggaacattccgctgcctctcaccatctcatgcacacatggacacatacatgctcacacgcacacaggcacgaggcttggcaggtctttgtggagtgtggaggcaacacaggccacatttgaacattttctccagcccatctacaaagtcctctgcaagcctgcccgcttctagtggggaccagagtaagataaggctctgtgcaggtcccagctgcagcagcacaggccttgctgccaatcggcttgacagcccggcagctgcagcgacacttacagtacccatggcaaacagggacgcgtgtggaggctctggccagcaccagcaacagaatcccagtgcaggcctcgaggacttgggagcgcatccaggcccttctccgcaggtaactcttcttctgggaaacacctctctggcttgctcctgggccacggtgtataccttgcccaggcttgcccagctaggtcacttctgttagctttgtgtaccagtccccaggctcacccaaggaacagactctgtgggtggcagcccctctccaagagttaaggacagcagcccctaacacccaggacagctcatcccgggtctgtgaaccccagccagcaggcccagggatgggcaggggatggtggatttttttttttctgccttctgctaggagcatgagacagactaagagagaggtgagagaaaagggcatttggaaacgagcttcgaggtaggggagaaaacaggctctttcttttgaaatgccagggttggcagcatcagaacaggagcgaacagggtcctggtactgtgcagccccacctcccaacgccaggggaacggagccctggcacccccgtaaacacacacaccaggtcctggatgggaccaagccaccactttgccccctgaacagcacactcagaaggggatctctgctctccagctaacccccctcctagcccccagggatgtggctcctttagttttgtggaggtgatggcgggaaagtcctgttctcagaagcttccttccccctccctgctctgtgactcctgtctcctctgctggacttctccaccttagtcttggtggcctggggggcaactgcccatcattctcagccagcaggcctctctcaggaggacaggccctggcatactctgcccccaccccccacccaccttttcaattcagacacaactggccagcactcacattaaaacagagatccggagagtaatggaatgaactcctggtagcaataagacaccaaactataaacaagacctgaggccatgccaggcaaggtgatcctgcaccctaaacctaagaataaggtggattctggccgccacaaggcttttctgattctctagcagctaagcaagcgctggccttgggataagcaacattaatataattgtagctcatccacctccagacactgacagctggcctgtgttccaccagccataaccacagctgtgactggacaagagactgatttcagtgactttctcctgacaagagaccactggccgtgggctggctctcgctgggtcacagaggctgcactgagcccctttgagtccctgcttcacctttccacatgcagggcctgattgccatgcctttcaatgttaagtctctaccccgaggtgaacatgggaggcgtgtaccatgcatgtgtgctcagcgcacacgcgtcagggcccctgtgtgaatactcatggcttctataacctgctgagtgtgcttagccagcgtatcctcattccagccccactcccctgaagtgcctgcttccggctttggccagaggctatgcttcccagctggtcacaatgccacctcgcaggcgtaaccctttacaaaataaagtctcctttcgaaattttatgattttgtgatttcttttcagttgacaccactcctccccctcccctactctcaggcaaggaccccctccctccctcctgaacaccccctatcatgtgctgccgacctctgcaggcctggccccctcggaatcacatcccgggggagcccctctgagcccactctcctccctgtaccggccccatctggccaccaccctgggagcatccctgtcctcgtctcagaggtatgccaaccgccccgcccaggtcaccttggctgctgaccagacgctcccagtcctcaacgcttcctacacgaccacatcccagaccctcctcacaccgtccccttccctgatcctggcctccaggcctcctccacatcgtgctggtgttctgacccacaaacggctctgattccacagctgtggtctgggcgggccctgtgtggggagggagagcccagagacctggtcctttattgaccagatgctcctgaacattctgcctgggtcctgtccctgtccccacccccaggactcctgtagttaaagcctcctggggagggtgtggtgccggcctggctgtggacttgtgctgaccccttctggggccgggctggactcaccctgaccttgttcctcttgagcagagcttgcagtcacctgcagctcattctagaacgacccccatggtccccgcttcccagtgggccctggggaatggtgtgggctcaggtggggcctgattcaagttggggaatcctaaagtggcatggcttcctggtgtgtttaaaatactcatttgctcctcactcagaagggcagttgctataaatggcctccagcagcctggagatggcactgatggtgtcatcagccagctcgggtctgagaggcgcctcctccctggagcccccgtggtggtgaaaggagcaggggccctgaggccgggcccccaaatctctctggccattcatgtggcctctcaggggatgtggtggtgactcagactccgaggtcatggagaaggcccctctgataagctgagctacgaatgtgcctgactctccttcaggaggctaggacagaggacagaggacacccagggacaatggcagaccagggcaaagggcagagaggaggctgcggaggcagccaggcagccagactcccgcccatgctccttcaccgggcgacccagaccttgccagggactcaggtgtctcagccacaaaatgggatggtggtgagagggaggggcctgagtgcatgttaaggacctggagagctgccaggagcatctgcagcaaatgggcaggccacactctcatgaccgtcctcccatccctgcagatgatccggacccagacgacaaggcagaaggtaggaaccaggatggcggcgcagaaaccaaccgagcatcaggtgcacctcggcgtgatgctgccagccccagctgaggatctggcaggccgagaggccgagaccccgtccccaggcgtccctgaggtctgagggtcaggttgtccatgtgtgggacgaacgtggctctcgggctgctgtggtgccctagtatccggtggaagcaggaaggtttggcaggtcctcagcagggatgcagcctcctgggctgacgcgaggctccttgccagtgcctcgacgcgcaatgcaggtgccacctggtggccatgggaccctggaaaggggctccaggtcccacaagaacaccccagttcatggccctttatggcacccatgggaggggctggatggggctctttcccgtttactgcgcagtgttcaagttgcccagagctccattagcctgccccggtcagccagcgtgggggcagcagagctccatggggaggggggctcctgcatcctgatgaaggcccaggcagaagcaggcccggcagagcctgaggctgagggcagaagggggtctctcctgggcgattctttactatgccctgacaagcgggtcagctcgccggctccccaggggcatggaaggaaggaagcgtcctcggcatccgtgggggagatcacctacgccaagtgggggagggtgaaaggtgaaggggggtccgtggcagccggcgagctgggagaagcacagcacccagaggaacccaggtggcgactcctgctccagggtccccacacccgcctctcaggaggggctcccctgtttgaagaaataaaaggtcctggggaggcccccgtgacgatttccccccactggtggccttgtgggagccttaggggaggagacgggatctcctcaatgtgatgatgggggcagatcatggggcatcctggagcctggcttggggcggaactcagtggggttcagacaccctggtcacttactcccctttgggaccagggagtaagaaacgggtgcctggggagccagtggcacaccaggccaggaccagtgtctcatgtggcaccagctcaggacccatgtcatgctaggaaaccatcatggcacccactacttgcaacagcagggtctgtacccactgcagaatctcacccagtcctcccagcagccctgtcagcagccactactgcatccccatcttccagatgggaggctgggcccagagaaggcgggtgacttggccaaggccacacagctggtaatggtggctggtgcagtggaaccgggcagttggggttcaacacacgggttccccattaccacccaaaaccccccacaaggtgccgtgggatgcaggctgcagtgcggcggatgcagattctgggttattttagaatagcctagaaggtcctcctctcctgacagggattccaagatctatacaccttcgcattgtggtaaaatacacgtggcctaacactgaccattgataacatttagtacagtcatagcactttgcaaccaccacctctatctagttccagaatgtttttgtcaccccagaaggaaaccctgcactcataagcagtcactcccctccccctcccactggtaaccgctcacctcctccctgtctctgtggatttgcctattctgggcatttcatgtgaaaggaatcagacactatctggcctttcatgcctggcgtctttcacctggcctcatgttttcagggttcacaacgttggaccaggcatcagtcttctgttcctctttatggctgaataatattccattgcacagacagaccacagttggtttttttgcttaccagttacgaccatttatggtttgggttgtggggatgtaggatggtgcggctgctatgaagacagtatggcattcctcaacactcaacagagttaccacataatccagcaattccactcctgggtacagaagaagagaaaggaatgcagggactcaagcagatatttgctcaccatgttcacagcagcgtcatcgcaataaccaagaggtgggagcaacccaaatgtcccctgatggatgagtggataaacaaaatgtggtctatccatgcaatggaatattactcagccgtgaaaaggaggaggccgggcaccgtggctcatgcctgtaatctctgcactatgttgcccaggctggtctcaaacttccgggctgaaacaatcctcgcacccaggagttcgagatcagcctgggcaacacagtgagacaccatttctacaaaaaaattaaaaactagccgggtgtggtgacacgtgcctgtaatcccagttaatcgggaggctgaagtgggaggattgcttgagcccgggaatttgaggctgcactgagctatgatcataccactgcactcctgcctgggtgacagagcaagaccctgtctcaaaaaaatttaaaaacacaaaaggaaggaagtgctgacacatactacaacgtggatgagccttgaggacatcatgctcagcgaaataagccagacacagaaggactaatactgtgtgattccatttatctgcagtccctagagtagccaaatccacagagacagaaagtagaacagtgggtgcccggggctgggagaagagagaatgaagagctagtgtttactggggacggagtttactggggacagtgtttattgggaagatggaaagttctgagatggatagtggtgacgattgcacaacaatgtaagtatactgaagtgtatgcttaaaaatggctgagattttgtccgggcttggtggctcatgcttgtaatcccagcaccttgggaggccgaggcgggtggatcgtttgaggccaggcctttgagaccagtctggacaacatagtgaaaccccatctctactaaaaatacaaaaataaataaataaataaaacattcgtcgggcttggtggcgcacatctgtaatcccagctacttggtggctgaggtggaggttgcaatgagccaagatggcaccactgtaccccagcctgggcaacagagcacgactgtctcaaaaaaaaaaaaaaaaaaaaaaaaaacaaaaaggctaagattatagagtttacatgtattttactatgatttaaaataataactttttaaaagggagaggcatggcccaggcccaggcgcctcacctgccagccccatgagtgcctctctgggcctttgcatccatctgtgctgggggctggtggtggggccactctttggggtcttggaggatcaaatgcaaatgcacccacgcgcccgggggcctgagcctggggtgcatgcttggcagaggtgagctggggttttctttgtcccacactagactgactgcctcgcgggtggacgactgttcccaggtcacggttgagggtgaggccccagggaggcctgggatcatgccagggcaggcagggtgactgtggcatgcagcagggctgtgaggacaagtctagggctaaggtcccatctcagtgtccccaggccttgctgtgtggccacaggcattttgctgcgcctctgcgtcctaggagtggggataagcagcacctcggggctggcatggggactgggtaggagcgcagagacactgagcgccttgggaagtcctgggcctgcatgtcactcggggctggaagtggcttctccacacctggtcacttgctggctggccccccactgatgagacggggtccttgcagctccacttctccccatacatttctttcctgcctcgcagctctgggtgctggggcttgtctctgccaaaccttcccggagctgacagtagggaccagatctctccttgtctgcctggaccgtggtgtgtagtgacagttctgggatatatgcccctctctaggacagaggctgggtacggagctctgagcattttcctccaacctgggcttcttccctctggatcactgcacctgggcagagaggcccaaggaaacaaatctccttgattcttttgcttgtcattgagaaactcaatgctgagcatgagttgaaatttcaggcatgctgagctgaaattcctgtggcagcagctgttctcaggaacatgtcagttccataaggcaggtgcccccatactgtgcaagataaatgtgtttccgggtgtcagcaggcaggactgccctggacaactgtgtaggttgttcactccacaagggggtctgctgggggtggtgttcaagtccactctgtgctctgccccccatgctgtgcacagctgctggcatgcctgcctagagtggggggccttctcacatttgcacaaaggtattgtgggctcacagaggtggcccatcagcaaacgcctcaagtctatgggcagaattgtgggtctgtgtgcgtgcattttcctagagggagggcccctggtcctcgccagactctaaaatggagtcacaacccagaaagaggcccagagcccctcttccagggaagcaggcacagcacagtgaagccagctcccaatacagtccattgtccatggaaaaaaaaaaaaaagcatttagtgggaatgcagaatggtgcagctgcagtgaaagagtttgaaggttcctcaaagagttaaacacagaattacccaatgacccagcaattccatgcctacttataaccccagaataattcagagcagggtcttagaccgacacgtgcgcatgagtgtccacagcagcaccattcagtagccaaaagatggacgcaacccagtgtctacggacagagggatgaataacactctgtggtcgagccatacagtgcgacactcacagaaaggaatgaaatgctgacacgtgttccaacaaggagagcctcagagacatgatgctgaatgaaagaagccacgaagcaccccactttgcatgattgcatttctatgtaatgtccagagtagccaaattcacagcggcggaaagcagacgttgccggaggctggggggaggggcaatgggagggacggcccttggggacggggtttccttctggggtgatggaaatgtccaggaaccggaagaaggtgatggttgcacaccctgtgattgtgtcgaatatcactgtacacttttgaatggtgaattttatgtgtatttttacattttacatttttagacttttatttttgtagagatggggtcttgctgtgttgtctaggctggtctcaaactcccgggctaaaccgatcctcctgccttggcctcccaaagtgttgggattacaggtgtgagccactgtgcctggacttctttttaaaaagacaatcgattcaaggtctcaaatacagagactcctaggtgcaaattctacatccttattccagtgtcagaactgctgagaatgtccaacctagctccaatcacaacccgggggcccatgtcatctggcccctccccctgcttgcctggcgttccctctgccgcagccatgctgggtgcccctctgttccccaatgactggctcccatcagctttttgggggacatgcatatttctttaattgagatgagcttatataatgtaaaattcacacttttaaagtgtgcgactccatggcatttagtacattcacagtgttgtgcaagcaccacctctagttcatccccctacaaggaaaccccctacccattagcagtcagtcctcactctccccttccccagccataggcaagcaccaatcggcctgtcctggacatttcatgaaaatggaactgtgcaccatgtctccttttgtgtctgcttcttttactcagtgtcaccccttccatgctcacccacaaggtggcacgtctcatcactttcttcctctttatggccaagtagtgttccactgcatgggtgcccattctccaagagctgtggtacatggctggtctgagctcatcccagcccagtgtctcttggtgaaggaggagtaaaggccagtatctgctaggcgctgccctagaggggcagtgtattagtctgttttcctgctgctattaaggacatacccaagactgggtaatttataaaggaaagaggtttaattgactcacagttctgcatggctggggaggcctcaggaaacttacaatcatggcagaaggggaagcaaacacgtccttcctcacatggcggcaggagagagaaatgctgagtaaaagggggaaaagccccttataaaaccatcagatcttgtgaaaattcactcactatcatgagaacagcatgaaggtaaccgcccccatgattcaattacttcccactcgttccctcccacaacacatggggattatgggaactacaattcaagatgagatttgggtggagatgcagccaaaccatatcaggcagtaactcactaagtccttgctcagccctgggaggcaggtgctgtccccattcacagacagaagccaccatggagggcccagggcaggacacagggctgggacaaggccccaggtgtcctggtctgcagtctgtggtcttgcccctgagccaggctggcttcaacaaatgccagctggatgaaagaatgacagtgtcctaagactgctggggagtccaaactggtggcttcactctagcatgtcacttcttcccataaatgacagtgacacagttcatcagttcaggtgacgcttcagacactactgcacagaccgagggatgtagaggacaatggcgaggtggggactcacgatctgcatgacggtctttcccttgactgtctgcctcaccgagagtgcagtcaggccatgaagctgcttcggcccaacagagatgaggatagtcaagttcgttagctatgcaggggcaggagatgtggatagtgcctctggctggggaaacactgacaaaggagccatggctccaggaccctggtcagggtggtcctcagctctcacactctgcttcccacccatgttgaacagggcagagctgacctggagggaagactggctttggggcaggtgaggcaggcacatgaagtagtgctcatgaccagggatggttcccacgaacaccttcctccctcccaccctctattatccattttccatccatctgctcacctaatccatcttcccacatgagtcagtccatccatcgctctatccatccattactccatccatccatctgtccttccatccatcctctatcctccatcattcagtccatccatcactctatccctctgttcttccattcatccattcattatctaccatcatccatctgccatcatccatcagtctaaccagtccatccatttatccatcatccatccatccatccatctgccatcatccatcagtccaaccatcagtccgtccgtccatccatccatccatccatccatccgtccgtccgtccatctattcatccattcaccatcatccatcagtctattcatctgtctgttcgtccatctccccgtccttctgtctgctggtgcatctcatgtctgtcaggttgcctctgtgaggtcaagtgttgtgctagacgctggggaatgaataactcctggccccgcctttaagggctgcacagttgggcaggaggatggccacccagggggaccgaggccagccctgcagcagggccacccagcagcactgtgggaagtccctgtgctccacggggcaggagaggttcgggtgggccatccgctggcagggagctgggcccaggcacttgggaagcttgggagcctgagaagaaggtgtcagggcctggtaagctgtgggggaagcagtgactggccggagaccccaggaaaggcacatagcccagaatggacatgtggctcacccgaggctggttgactgagggggctgcgtgggggctgggcctgaagccagaccagccctacagggcccaactctctgcaggtgcacacactgtcgccaaggcacgtggacacacctgcacccccaggccccagccaccgacagcaccatgcctgccccctgggggccctcaccctgggctgaagcccacccaggtctgctggaggcaccgacccaggagacctccttaccctggcctcactgcccggctctgtgctgagcctgccctgtgtggtctgagcggagctcacagtgccaggggctgggccagctgtaagtggcggggtgtggcgggctcatcacgcttgttgtttgttaaagttcaactccgttggaccaagctgagatgaggcttggtctaaaataaaaccggagctgcgtcagtgtgtgggccggctctgtaggctggaggccactccacagccagcaaagtgtggctgtgcaccccagggctgtccccacccaggctggcgagctgtccccatgaggcccagctgtggcctctggtgaacccgagaggcagaatggccggccgatcctgaggctgtgtctgcacccacatggctgcggtgggcacagggcccactcccagggacccgattcccacactcagtgtctcccatgagctcctgggcttcaggcttgtggctccccttcagctggggtcagacacctcaggcttggctctcacttcttgagccaatgtcttggacatttcgtgaaaatggaaccgtgcaccgtgccaccttttgtatctgcttctttcactcagtgtcaccccttccatgctcacccacaaggtggcatgtctcatcactttcttcctttttatggccaagtagtgttccactgcatgggtgcccattctccaagagctgtggtacatggctggtctgagctcatcccagcccagtgtctcttggtgaaggagagaaccatggggtgaggacagagcagaggacccttcttactccaggaaataaacagcattttctgagccgtgttgagtgttgggctttgtgtcgtacgtcagctagaagagggttccccagatgaggctggggaggggtgggggcacggtctgcccatgctccttttgctccctcagggcctcccaaacactgagatcctagtttgaaaggatctgccaagttccctgagcgcccccctctcagagtcccctgcaggggtgtccccaacagcccctccagaatttaggcctgagaagcggaggagggaaacctccccccaggatgctcattaggaaagaagcccccagggccagcatggcagcccccaaaagatatgtcctagtccccggaacctgtgaatatgactttatttggaaaaagtctttgcaaatgtaattatgtttctcaacagaatatgacccgggatttatggtggtttaaaatccaatgacacgtgttctcgtaagagacagaagaggaggagacacacagctgggagagggcatgtggagatgaagtcagagacaggatgcagccaagccaaggaacgctgggagcccccagaagctagaagtggcaggaggcctcctccccggagtcttgggatggcacggggccctgccacacctggctgcagccctgtgaggctgctgtctgacttctggctcccaggactgtaggggaacacattccccttgcttgaagctgccccgtttgtagccacttgtggcaagcccaggccactcaaacacacccaacaaagtgaagaaataggcggctgggccctggctcagtcctgcagaggcacgagtcagctctgcggaggggaccctcgacattctgctggcaacagggaccgtgtgtgcggggccaggcctggtgtagccgacgtcaaccctgcagcaggtcacagaggcccgtggggggtcttccaggaggcattttatggggcacgtgccctgaggaactctctggccagtcacctgccctagctggatttacattgagagggcagcgagagaccccatgagtgtcacaaaacagtgatctcaaagtagctcactcacttgcagaggggcgttacccttgaacactcgtgaccatcctgggcccagcacacccacggggcagtagcgagcggtggagatgaggggcagagaccagtggggattcaggcggtcactgtcacctccccagcctgaggcctgggtaaggccagaaagctgagtcaccccacccgggggctcctgcagccctgcctgtggacatagccagcagcccacacggagtccccgggcgctgacctcttccaaacagccttgccagtccttcccccagaattagccgacagtgacccggagggaccaggggatctgaggccaccgcctttgtcccgaggggcttggccaaggatgcacagtggagtggacactgcttgccaggcctcttgtggactgcacgctaggcctctgtgccaggctctggatggggcaaaatcacaggtggcacatggctcatatggtattctggggatgcgtcctcccctgagccagtgctaaggaggtggctcccactgtcccatgcagtgtcctggcccttggtcagagtaaagctctggtcaggaggaaggagcaggataacgtggggctaacctgtctgctgcaggaaatgcatggaggaggaggtggctgtcactcttgctccgtcagtggtggagtctgtgctggttccctggggctctgcctgctccagggggagataagatccaccagccagggggcagaacagcccccggggcagagcctccagggaacagccccattccacacagagaaagcactgggtggggcgggaggcacgcacagacggtggggagggctgagtgttgggggcagccctgagtgctgtctcaggggcacccccagcctcaccatcaaccacccctccattagccttggctactgagatgcagcctagaagaggacgtgggctaggaagcctcctgggttaccccgtcggccgccacaagcctggcacccaggcactaggcttgcagaactactctgcctctcgctcggggccgatgtacgggtttacttttaccttatgcagagttctaacagggtggctaactggatctgcggcacacagaggatcaggatcaggaaatcagacaaggaagaagggctgcagaggcaggcccatgcacacagagggagaggccggatggcagagcgtgcacggccgaccccaggatgcaacagcaccgaatgccagtgccacagagagcaggctgtgccacacgcgggcctggcatgacctggtgcccaaacgcagctggcaggacagccttggatggactggagacattaaatgatgttctccatttaaagaaagtagagtaaatgaagaacattttagaacattccatcccaaatgggggccagactccgagtcggggtgcccaacagatctgcgggggaaaggtgctgtgacaccgcggtctggggggtttagggcacacagaaagctcactcgccacgctcaccacgctcactcgccacgctcaccacgctcactcgccacgctcactcaccatactcaccacgctcactcatgagtggatgagcaatcacagacagcaccacaggctggcggcaactccggcgctcttatctacccagcttctccctgcccagactctgctgtggggaccaggatgtaatctgggcgctgacccatgtccaccctctcctcgttcagctgggatgagccatgacccagcaggctggggtttccagggagtgcgcttctctcccgggggggccgtagcagagggcctgggtgctttaaccacagacgttcatgttcctacagtcctggaggtgaagtccaagatcaaggtgtgggcagggtgggttcctctggggactgcgaggcagtttctgttccaagcatttttgtgcccctggtggtggctggcaagccttggtgtccctggcttggaggagcatcacccccctctgcctccatcttcgcctggccttcccactgtgtgcctgtctgcgcccaaacctccctcttcttacaaggaagtgggccagtagatcaggggctgccctacccttgtgaccccatcttaaccagtcacatcgcaatgtcccaatttccaagcaagacctcactctgaggtaatgggggttagggcttcaacgtaagaatccaggggaacacgattcattccacagccgtgagttatgggcatgcttgtctcatctcacatgcctcccccaggccagtgtccccaagagcaggggccagggctcacccatctctgcaagaaggagaacagaaccagcaagcggggcgcccacgggcaggtcaaggggacggcgtctgagaaacccaggcaggctggggcccctccctcctgtggagtcgaggtgatgaaggcaggctggggctcctctctcctgcggagtcggagtgatgaggaccattctcatcctaccacctcctccctgcccgcgggagcctgggagtctcatgtccagcctgacacacacacgatacccatggccgcagcttcacgattagcgacggggggtgagctgactccatggaggccttgaaacccaccccgtcagccccacccagggctgcatctttatagttttaatttttaactgtactgcggtaaaatccatataacataaaacttccaacctgcccaacatggtgaagccccatctctactaaaaatacaaaaattagccgggtgtggtggcgggcgcctgcaacgcccagccactcgggaggctgaggcagaggttgcagtgagctgaaatcacgccactgcactccagcctgggcgaaagagtaagactcaaaaaaaaaaaaaaaaaaactcagatataaaactcagcacgctaacctgttagcgcagaattcagtgtcactgaacacacaatgtccagaacattctcatcttcccaaactgagcctgtccctgtgaaccactaactccccatctccttccccagcccctggcactcaccctccaactttctgtctccatggacttcgctactctagaagcttcgtatgactgggatggttcagtgctgagcttgtctcccgtgactggcttatttcacttggcataatatcctcaagggtcctccataggaggcctttgtagccagtgtcggttttccctcctgcctaagatggaacgatgctccctgatcgggatacaccacatttgccttcctcctgcaccggtgatggacacttaagctggccctttcacctgagaacacctgtccttccgtcagcctggctgcacctctaagccttccctactcatcagcctggcgggaacagtaggaatagccaccggccccccaccaaccatccttggcttcatcaagaaaatggacagctggctgtgctggctgggcagcttcctggcgtgccctcctggccagtcacctctgcaggtagcaggtgggctggcaggcacgagccagctaggacacggtgagtgatgactagatgtgtaggtgactgtgggcctcaccagagacctctgggcaggcaggggtgaggccagcaggcactgacagatgtggggcgtggagcctggtgtccaacttggctctgagagcccggtttatggcctaaggcagtggttttcaagcgggggaaacggtgccccccacaaaacacattcagccatgttgggagatatttttggttgtgacaacaacttgtgttgctactggcatcttgtgggtggagaccaaggaagctgctatacatcctacaaagcacaggacagtcccccacaacagagaattgctgagtcccaggtgccaccaatgccggggctgaccctgccctaaggctgagggcagccatcttggaaggcagcctgcagttctcgtggcagctggcacagagcaggacccatgcaaaccagagagctcctcactcagaagcttctgcacaccccgtgacagtggctagagggggtttactgcccaggatccacgctactcctctgtgcacgggccactgagtgcccagtagtgcctgggcaaatgctgagtggctgctgcatggcatggttgagttattgcagagaagttacaaaaacagactacatagtgagctgaccggtggccctcgaaagatatgtccatgcctttaacccctggcacctgccaatgtgaccttatttggaaacagcctctttgtagatataattaagttaaggatttcgagatgagatcatcctcggttactgaagtgggccctgaatccagtgacgggtgcccttatgagggatgagaagagagaggaggatgaggctgtgtgacgacagagacacaggttggcaccatgtggctagcagccaaggaataccgggagccccagagctggaggaggcaaggaaggaccctcccctagagcctagagggggctcatggctttgcccacaccttgattttggaattctggcctccgaactgtgagaaaatccatgtgtgtcgtttgcagcacagcccctggaggtgcatgtgggctgtgctcagccctgcttatgggacacggccatagcctcctgaccctcactgggcagggctctgggactctctccaacacctccactctaaccatcaggtccttcctggagcacaaacccaacagcccaggaaggttggcaaacgactcagaagtcatgtgggcctgagtggctactcctggaagctggttcccaaagaagcattttcacaagacaacctgatcacgcagcttcctgcctgtaccctggcggggtttccaatgggcctcctaactcccgggcaccatagcctcagtttccccactgccatgaagagaggcaggaaatgttcccaggggatttctctagtatctcaagggctgactgtccccccatctggagatctcagcaggaagggggcccccccgggaccgctgaccaatcccacaaatgagaacttgaacagagcaagcaggcgggtagaagggcaggggcggcatgcgctgggtgaggaggcagagccctcaaccggcctggcgtggggtggcggctgagctccccagggtaactgcatgtgcttttcatggaactggaactgcagtttgatggccgggcacctttcagatcagaggatgctctgttagagaaaggcacggaggagccacacacagtctgcgttgtgaaatgggtatttggttttcctctcctctactgacacatggctcctaaaatctcaggaccctccagagtgctgagtgtctttgtatgctagtgagatgactggtggctgggggtccctagatagcttcagaatgggggctggttaccaaaagaaccaatcccaagattagagggttggaattttccgccctgccctccagcctccagggaggagagagagaggctgaaggttgagtcgatcaccaatggccaatgattgaatcaatcatgtccgtgtaatgaaacttccataaaacccccaaaaggacagggtttggaggagtttctgaatagatgaacacgtggaggttccttgggggtggcgtgcctgggcagggcatcaaagctgcacgccttcccctgtacctcaccccacacatcactccatttgtaatatcctttataagaaaccggcaaacgtatttccctccattctgtgagctgctctagcaaattaattgaaccagagaagggcatcatgggaaccctgattcatagctggtcggtcagaggcacaggtcacaacctggggcttgttcttggcacctgcaaaggacgtggggcccatcttgtgggactgagcctcaccctatgggatcaacacactctccaggtgagcagtgcagaactgaattgaattaggggcacctgctggtgtccgagggaaccgattgcttgcttgctgtgtgtgggaaccccactcatctggccactgagggctctgtgtggattgcgttgagagagtatagtgggaagaaactgagtttgctttttcctatagcctcacagtccccccaaatttggcctcaacgagaggctgttagcagacacgttcccatttcttaaggcaactttccagaagtcaggaaacagcctatttggaaaacccaaccctgacctcccatcctgtgcctctccctggggatgacaggcccagttcaaatctccactctccacatgcaggagagagtcctggggccgcagaacctctccagccccggcctgcccactctgtgcctcagtgtcctcatctggaaaatgggccagtcccagcagctacggggaacatagctgttgtgaagataaaatgagcccccaaaggtggagccccacgcgtaggaccttccagaccagctgttagcaattgtcattgtttagcctggggtttggaggggggcaaggctactgcccctgtctgtccctgtgagacccggagcagctgcccgtgggagagtgactgacggatctcactgtgggccgtgcagtgtgtatggttcaccagggcccaaatccctgcccagggagaggcactcagcagggtcaggaggggccaccccgccctcaggtcacagtagacaccatcccatcccaacaccccctccctggcctggaccagcagatggacttgggaccaggagcggggtggccacctctgcagggacacaggtctttcatccggtaggcgacaaaaggggaggcccctgctgctgctgtgacctgaaaccgcagtctcactgcgacgacagaggcgagacctcagcccaccctcaggcttctgatgccacaaaggagcaaatgtcaccggggctgtcctgggcaaggcaccggtgtccccacccacaggtccttcagggattgcatcctctgagcccacgtgagcaccaaggacaccgtcgcgggaccacgtggggctgcggcctctggggatgggccagctgctgtgtctcctgctggggtggcggtggacctcgggagcttctctcacatgccaagcacgggcacaggatggcctcttggaagaggatgggccggtggcaagagcccaggccagggcaggcaagggccactggggcctgggaggggttgcgctctgattccccgatcaccaccccagtcctgccgtgggcgtctctttttgtctgagaatggatggaagtggctcctgcagtccctgggctcgcgctgtctgagctcctaatccggctggccggaggcagcgtcgcattgctaatcagctcctttgtgtgccagtctcgtcttcctgaccagctcccagctcctgcctgtctgcagctcctgctccagagacattcacggcccctgactcactgcagcctttgctggccctggggtggggctcccagggaggggctggccaagcaggggagtcagggcagctctgggaggccccgagccaccgcacgctctctcctggatggcgcccacctcagcgcccactgcagagctgagggtcctcacctcggggtcttggttttctcccctgagagcagctcagtgacagcaccgtctccctaaggccactgggacgggataattcacgcacaccctccgtacggcgcctgcacacggtaattgctcattaaacagctggtgttgtatttttttctgacaccaaatacatcattccaacatcaaccaattctctaatccctgccagctgggtgtcctactgctcagttcaattctgacagtacctcccagagtcagtgcagaccctgcgggcgaagggcccagtcccacaagactgccccagcctcggaggccagttgccaagaagtggctccccagatgacccacacttctgcctggctgactacgagtcagagctcccataacccttgctcaggtctgatatttgctagaaccattcacaatactcgggaacatgcatcacttatggcaaccagttgattatggaggctgcacctctgaacagcccacagggaagagaagctcggggcaaatggggggtgcagagcttccacacccccttgggtaccaccagcttggaacctcccaagcctggttgttttttataaatttatttatttaatttttttttttttttttttttgtagagatgggggtcacactatgctgcttaggctggtcttgaactcctgatctcaaggaatccgcccgcctcggcctcccaaagtgctggaatcacaggtgtgaaccactgcgcccagagttttaatggaggtttcaatacttaggtacagctgattaatcattggccaatggcaattgagctcaacctccagcccctcttcctgagccttctgcacctctagaatcatgtggttggtttttctggtgaccagcccctgccatcctgaagctatctagcctccgcctcccctaagtatcatctcattaacatataaaagacaggaaattcaagaggttttaagagttctgtgccaggaactagggacagagaccccaatgcatgcttttttattattccaagttgtcaagttgtcgagagtccagacaccttgcctcattggtcagtctttcctcaagatcgagaccctcccagcttccctgaccctcatgctacagcccagtcccattgaagcctccccctgccgactgggctggtgtagacccctggtgggccttggtgggagggtgtccactgccttgctggccttggcagatgctgggctgccccagtcccctccctgggaacaagggggaacaatgcatacacctccctgctggctctgggtgtctccagcgtgtcaggccctcgaggttcctccagctgcagaaccttctggggggcatcctgccttggccagctctgtgcttgccaagctatgattaagattctttgcttcaccagactccctggacttctcctgagtccatctgtgcgcttccgtatcaaatccaactttagcaagaactcccgaccctggatacctgatcaggccgctcacctcccacccccacctgggatgtctgctcaccccagcctgcctgcagcaagaatcccattaggtcagtttacccagaatctccctcacccttgatgcttccactcaggaattttccaccctctcactcccacccactcctgggccctaaatccccactagcccatgcagtattaggaactgagtcctatcccgtactaagtctcctccctattcaatattctgctactcccctaccgcaatagtcctggataaaaactgtatttattaacaacttttttttgagacagagtctcgctctgttgcccaggctggagtgcagtggtacaatatcggctcactgcaacctccacctcttgggttcaagcgattctcctgcctctgccttctgagtagctgggattacaggcacctgtcaccacacctggctaatttttgtgtttttagtagagatgccgtttcaccaagttggccaggctggtttcaaactcctgaccttgggtgatccacccacctcaccctcccaaaatgtagggattacacgcatgagccaccgcacctgtcctatcgctttaacttctgttcagctctagtcaccccacagcccagcacagagcaggtgcctgtaatcccagctggacagcgtgtctgagtatcaaacagctattcctcagtcttgaggaaggtacagatctgatttgaaaagaaaagcaacttctctgggacccccgcttgaatagctgacttgaaaggctgagctcttactctacgtaattgtcttccaagtgcaaattaactctgctaaaggaatccttggtccccataaccatttagacacaatcgagacagagaatttcaatgttcttggcaagcccctgcaagcccgaggctgagcttcatggcagcagagtgaagataagcttgttatcagctcactgagtttgaactagaaccggaaacatcctgtctccctgccagccacacagaatgccctagaaggctgtgggtgtggctggcatcagcatcctggcctggcctggtgcagccttctgggcaaaggaggcgctgacatatgtggcttgtactggacagatgtgggagccactgccctctcactccgccttccttcccaaggatggccggcaggggttgccagcatccgggtgggctgtgcccagacactggccacccctggagcaggcggctgctctccccactcagcggcccgctgcctgaaatagatgcttccagttttctcctgtgattttgatctttctgaaaagagcctctgacacagacgtgcacacacagccatctctaacaatcgatggatggctggatttcccttcctactgggactgccctgatcccaggtggggagactctgcttctagggctgcctagcccaagtcccatcccgtccacccgccacttccctgctcttgacctcagcccgtctcccgctgggctccgttctcagggcagcatctagagtttagtgggaggctggccggcgcctgtgcccggacatggagcccactctctgtccttccccttccagagtccccaaggatgagaacagaggctgtcactttctcccctaggaggcaggtgtggtctatgggagaggctgccctgcgcaagtgctgaaccctggctgttgggatcacgggttattgtgggttgaaaagtgttacccccaaacctatgtccatgtcctaacccccggagcctgtgagcgtgaccttatttgtaaacagggtctttgtagatgtaatcaagttaagatgaggtcactggggtacatcctaatccagtcattggtgttctcaaacaagaggacaatgtggacacgcatggtgggaaggaggccaggtgaacactgatgcagagatgggggctgctgctgcaagccaaggggtgctaggggttgccagcagccaccgggagcaggaagaagctggaggagtaggcaaggctcctcccccagggccttccgggaaagcatggccctgctgacatcccgacttcagactgctagcccccaaactgtcagagaccacgcctctgttgttctagccacagggtctgtgggacgctgtgacagcagccccaggaaatggattcccaggcacagctgtgcacacgggggcgctcgacgtgaaagctcatgctgaccacacaggccctgagaccatggtccgacttacgtaggtacttatcacaggctgcaagcaccgcagcccccagtgacctgtgcagcggaacaaaggattccacgccgactgagccaaaggcatcccttccagacatggatgaggtgcgggtcatttcaagtttcttctgcctctctcaccccaagcccacagtcacactggtccccctagtgaagggcccttaaaaataagctcccgatggccgagaaaggtgctcctctgtatttaggaaatggagctgcctgcttcctctttggtgatgggacatcgactaggacggcctcatgacatttgcgaagcgaggttgcttccgctgtcctctcctttggtgctcgaggcagtgtggccaggggcaggcgggggccgtggctcccctctcagaagctgggctcagctgggaagtgacccgaggtccccggccagggactggggagcttgagtgggacaccagggtcccagagctctgtccctgggatgggacgaatgtattaggacctcgaaggaatcttcagccctgttggaattcatgcctcttggaggtgagaccttttccacagacagttaacaccgacacaggtgctcgaggaaacagagctgcattttaggcgtgattctcaccatacctccatgtttgggtttttcaccaggcaaggggcttgcgaaagacacagcgaagctccggttcactcgcagccaccgcctctgggggacttggtgggctctctcctgctgggctctgtcagggctctgtccagtgctggccgaggcctccccatgtgcagggcactgccctgtagcctccccggtcccccagaaaaaccgcaccggcttggccaccaccccagaagccaggaagccaagagcagctcaggcctaccagctcccgccaggctcccctcttcctactcctgcctggggttcctgtatccctggaaagggaggcaccatcaacccaccccctctatgcccacccagcagcccaggtgttctgctgcagacccactcccggtagcacctctggaaggggacacatccctgccatgaacgacctcagcctccttacagccctttccccatgtcagttaggcagaggagaccctccctacctggagggtgggcaggagcacagctggtcttggagcagacgccacccctcccctgctggagcctgctgcatgcgtacccccaggtgggctggggcaggggatgctcttcggtttttggcaaatgctgcgttctacaccctggaccctgcttctcactataccagggtctttctattcaagactaaagtctagcccactgctactgctgctcagtgaaaatctcatctgctggatctgctggcgaggcctccgttcaggaggaaagaccacatccaaggggtcggctcgcatttggtcccggattcgcgtgggttggtgggctaagaactgagcgatgttgttagcgaaggtcccacgtgaaggagaaccctggggaggggcccggtggtgaagggggtataccctgtaggctcagcgcccaaacctcccttcagtcctgggccacggggctctcccaggcagtcagcgggtgaatctcagggcaggacaagctccaggagggcccagaggtggtggaaatgtgagtccagcctcagggcctccatggagcaggtctgagaaacatcgaggtgtggatggatggttatggagaggaacttgtctagcctcatgagcagacacgtgtggacccaaacagccacgctgcagtggtaaacgctctccaggaaggtccagggacactgagaaggcgatgcccctgagggccaagcggggagggccaaggggctggagtgccagcggaccccctcccaccccctccgagacctcatccctgtactttgctgggggcttcaccagggtctgcattttcacatgtgctcactctgcctgtgtctgctgcagcaaatgttctttttgagggagaaaacacatacagaaacttcccctggtgttgcctatgatgtggctctttcagcttcaaagatgtgtctgaggctctttcccgaggccttgagacggaggctggagcctctgctctgtgccctgcccgctgcccctccccctccctcccaccgcctcccccatctccacccggccagtctgaccctaagctgcgtggacggggagtggagctctacctcttaatttgtgggcagaattctcaaaacattcctaccacatgcagaatgtcacacctgactttcgccccagcatctgggctctgatggcgaccgcatgcctgttatctacccccggcctcggcagccccggtgtgatgcttgccatggcctgcattccaggcatggctgcttcctcaggctgactcagtggtttttttcactcaaattcccaagcctccactaagcaggagcatgaatagagctttaattctacaacgatgcgctagttacgtctttgtactaagacactaaaataaatatgctccatcaacatgaagcatagccctatatcccacttagcctcagctgtgggccccacctggggatgtggtgtctctgctcgtccacctggtccctggcctggagtgatgtgaaactcccgcaggcctggactctgggttctgtagcaggcacagtcaggagtgctgggctaggaccctgccgtatggccttgaggctggagggctggggagcgagactctctatgcgccaagcctgtgctgccagcttcccagcccgaggcacgggggagcccgtgggggtgtgagcttcctccctcctggggtctgtacattttattggagagcatggatgaaacttaaatgcgatgagtaattccaggcagtacccaagaccacgtttaccagtgacaatgcctgaggtcagggtgattcccaggagggctgcatggaggaggaggctttgacctcggctttgaagaataatatgagtaggtgaggtgacagttggaaggggcaaccggcatttcccaggtacagccaggctgcctgcgaacaaacgcacacaggcgagcagacagagtgggcctctcctgggaggagagaagctgagagaatgcctgggcgcctccagcccaggccaagcctcgggaggttgggactcctggtgcccagcagggccctggaacactcgtgcaccaagctcagggagatttatagctcaatttagttcctgtatgtcccatgtcacagcgagtcatttatcgagtgcttcaacttgacaacaactgaaaaattaatcccaacagcaagcgattaactctgcaaggggatcagatgtctcatttcccaggctctaatctccaggcattcgtctatgaagcgattcgtcactttctacccaagatgacacaggcagaggctgatcctgggcaagccgcgggccaccatgggctgcctctggggctcgtcgctgggcgtcattaaacctgtggctcgagggttctccgtggcgcagggggccagtgacggacacagcctggggtgcaagggagtcaccgtgtccagctgcatcgggacgttttccttacacacgtgtctcaggacggagggtgactctggtgcccacctgccctctaagctggacccagttccggaagcctctagtcgtcagcttgggctgccctaacagagcacagacagggcagcctaaaccacagacaggctggaggctgaggtctgagagcaacgtatctcagcgttggctcctcctgaggcctctctccttggatggccgccttcccccgtgtcctcatgtggtcatccctctgtgcatgtctgtgtccaaatcccctcttaaggacacagtgatatcggattaaggccccctctaatggcctcatttgactttaataatctcctttatttttttttgagacagagtcttgctctgtcaccaggctggagtgcagtggcgcgatctcgtctcactgcagtctctgtctcccaggttcaagcaattctgcctcagcctcctgagtagctgggactacagctgcccaccaccacgccaggctaattttttttgtaattttagtagagaaggggtttcaccatgttggtcaggctggtcttgaactcctgacctcaaatgcttcgcccacctcggcctcctaaagtgctgggattacaggcgtgagccaccgtgcccggcctgatcttaatcatctctttaaagaccctgtcttcaaatacagtcacattctgaagtactggggattggaacgctaatgcatggatttttgagggacacaactcagctgtgacgatccccagcagccccctgccatcctgactgccggtcccagctcctgtcctgacagctcagtcactggaacactcagccacgtgaggtgcaggagtgcagtgggacgcacgtcaattcagggtcaggagcctggcacccgggctctttcaccgagggccatgcgatcatcagcaagacgcttctcctctctgggggaacatgcagcagaacaagacaatgtcagaggtttgcttctgccctgccacttgagcttccagtgatgatctgcgtgacatagggttgaagtcaggatgtgtgatacatccctatattagttaacaccccctcagtgaataagagcccagtcacatcaggagtcactcctcatccaggtggggttgggataagctcacttgcaatgggtgattcaggggtccctgcgtgtgccgcagaagaggctacaggcctggtggacaggaagtcagcagcaatctgaataaagtcatgaaagagaactcgaaatggcctggggtcgctgaccggactggctgcaggaagtccccgctggggatgacaaccttgctttgccttctcctttgtggggagcagatggtaggaacagcctgtgctgataggggaggaactcccgagtccagcccctgtccccagaaaacacaacatctgcaaccctcccctcctgataagaaatcacaggcacctccttgaccctccaaccacttctagaacattccattcccctcctaagagcctggctttgatgagcccccaagggggtccagtctcagatggcctcaaaagtcaatgcgtgctcagatgatcacccacagtgcagcttcagggagggttccagagcggcctcttttccacctgttctgtcctctcggataatgggttccccttgtaatcctggattccaccatgagtcaaagcttgcaaggacctacctgatcttattttaacaaagactttatattttggaacatttttggatttacagaaaaattgcactgcacagaaagttcagagttcccagattccctctcctcccccctcccccaggttcctctgttagtaacaccttgcatgaatcggctgttatttgttgcaattaatgaaccgatactgacacattataattaactaaatccacagtcatcagagggttccttctgggcattgtatattcgttggttgtaactatctataacgccccgttcccccactccagtgccatacagaagagcgccactgcccaacaatggctgtgccccatctttcaccctccctgcccccaatccctggcaactgctgatttttcactatctccatttttttttttttttgagaatgtcatatacaggcacacctcacttcattgcacttcacgaacattgcattttttttttttttaacaaatcgaaggcctgcagccaccccacagagagtcagcccatcagcaccattttcccaacagcacgtgctcactttgcatctctgtgtcacatgttggataattctcacaatattccaaactttctgtctgttatcgtgatctgtgatctatactttttgatgctactattggatttttttgggggtgccgtaaaacacactcaaataagatggtgaatttaatcgataaatattgtgtgttctgactgctccaccgactgtccactcctccatctctctccctctgtgcaggcctccttactccctgagacacaacactattgaaatggggccagttaagaactctacaatggcctctaagtgttcaagtgaaaggaagcgtcacacatcattcactttaaatcaaaagctagaaacaattaagcttagtgaggaaggcatgttgaaagctgagacaggctgaaagctaggctttttgtgccaaagctagccaagttgtgaatgtaaaggaaaagatctagaaggaaattaaaagtgctactctgggctgggtggggcggctcacgcctgtaatgtcagcactttgggaggccaaggtgggaggatcacttgagccctcgagtttgagaccccatctatatgaaaaataacaaataaattagctggacatggtggcatgtgcttgtaggtcgcagctactccagaggctgaggcagtggatcacttcagtgcaggggtttgaggctgcagtgagctgtgaatatgccactgcattccagcctgggtgaaagagtgagaccctgtttcaaaagaacaacaacaacaaaaaagcgctactccagtgaacatacaaattatcagaaagtgaagcatcctcattgctgaaatggagaaagtttcagtggtctggatagaaaatcaagccggtcacaacattcccttaaaccaaagcctaatccacagcaaggccctaactctcttcaagtctatgaaggctgagagaggtgagtaagctgcagaacaaaagtctgaagctagcaagggtgattcatgaggttgaaggaaagaagccatatccataaaataaaagtgcgaggtgaaacagcaagtgctgatggagaagctgcagcaagttctccagaagatctagctgagatcactgataaaggtggctacactgaacaacaggttttcaatgtagcctgtttaggttagcttcttttgcttaatgatacggatttaagtttcctccatatattttgtgactcaatacacctcatttcttttttatgcctcgatagccatttcttttcattgctgaatacttttccattgtctgaatatatcacagtttgtttgaccactcacctactgaaggacatccaggctacatccagtttttggcaataaagctgctataagcacttaacgtgcagcctgatcacatttattttctctctgtctctttctttctttctctctctctctctctctctctctctctagctttcctttatttttttgtcttgctctgttgcccaggctgggttgccaggatgcaggcacagttcactgtagcctcaaactcctgggctcaagtgatcctcctgccttagcctcctgactagctgggactacagggacccaccgccatgcccagctaatttttttcttttttttttttttttcttgagacagggtctcactctgtcacccaggctggagtgcagtggtgtgaaatcagctcattgtagtctcagcctcccaggatcaagtaattctcctgcctcagcctcctgagtatctgggattacaggcatgtgctaccacgtccagctaatttttgtatttttagtagagatggggtttctccatgttgaccaggctggtctctaactcctggcctcaagtgatccgcccgccttggcctcctaaagtgagccatcgctcctggcctcattttttctcattttaaattttttttggtagagatggggtcttgctgtgttgcccaggctggtctccaattcctgggctgaagtgatcctcctgcccttggcctcccaaggtgctgggattataggcatgagtcaccacacctaggcgagcctgactgtatttttacaaagccagggccataaatgtagtggcattgctggtgtgactcagaaggacccaaccacttccatatttcaagtgctcaccacataccaggcattgcactaaaagcctcattcattcattcattcattcattcattcattcattcacctcttcactcaatatttaccaagtgcctcctagatgcaggctgtgtcctgggtgctgggaatgaagctatcaactggcctcaggatctcacgaattacagacaaaaagcaagcaagcaaacagatgatcacatgtgagttccagggcggggactgaacccaggccagcccaccctgaggctcttgctgctaaccaccacctcctcctaagaagggactcacatggagggcgttccatatggaagcttccagacagatgttctggatgctcagcagtgggggaggagcccagatggagttggcagtcctggctctgaggctggatgtgacccttgggaggctcattccagagcttgatgtcggtcttgctgctaaagccgggagcagggagcaggctggcagcaccgcggggccagggcaagagctgacagtggggcctgggggagctgtgggtggggggccctcacagctgtgtcctccaagattcccacagtctggaaggacaagcagaaagccccctgacctgggctttcctgtgcaaaggcccaagtggttccggagatccccagtgatcccgaggaggctgggcctgcacgtttccaacggacaagcggctttcttcatgcacacagctgcccagtgcatctgagcccacctggaccctgcagctgggctttctgcagccacagctcccaggcgtgccgagccggggctgagtcactgctactatttgaacactttccccttcaaaatgacagtctttggcaaatatgttaaataccaattgagaacaaatgccaccaggaactctgatcatccttcatctgctgagcaaggaaatgccaggggagaagggagaggaggcgagaccgtgagggggcccggggtccatgctctctggctgttccgtggcaggggtccagctgcccaccaaggaggcctgggtctttctggggattctcggagaggttctttctatctggaggtgtgcgagggggagccccctggccccccgactggaggctcattcacctgcccactggggcttcggtaggagcgtcaggccatgggcttgtgggcttgatgtcatgtgggggacacctgtacctgccctctggacaatgccacgggagctctcagcaggaagggagcagccggcttccccctgcgtcagcatcgggctcagcccattcggcgtgcacgacccagcccagtcgtgcctgtcaccgccacagagctggccttcaagacagtgcctggacagagcttcggagctcaggctggagccagcctgccagggttccaagcctggatctgccagctctcacttggatggtcttagacaagtggcttacctctctgtgcctcagtttcctcgtctgtaacacagaggcaagatcagtgctcccccatggggatgctagctgggaggccacgtggggaggtagtcagtccagggcctgatgcaccttgggcccctgagttttgcagagagccagattctacacttgggcactgggtgagtgaaccgaaagagacaggactgtgcacacctgagcgggaggcgaccagaaagacacactgacggcccagagcgcagggatgaggcagctacaggagagcacaggagggctccggcttcctggaggacgtgaaagaaaacagcagcacagctgctgcatggagagaaagcagcccccgttggagtcggcctgcagcgcgtctgcacacggaagagagatgtgctcggggcaatgtgcacacacacgcctcttaataacgatttcctcatttcggagactcttaataacaattttctcatttcacagacgctatatttttttttccaagatggagactctttctgtcatccaggctggagtgcagtggtgtgatctcggctcactgcaacctctgcctccagggttcaagctattctcctgccttagcctcctgagtcgctgggattacaggcacctgccaccacacccggctaattttttgtatttttagtagagatggggtttcaccatgttggccaggctggtcttgaactcctgacctcaagtgatccacctgcctcggcctctcaaagtgctggcattacaggcgtgagccatcacacccggcccatagaccctattttttttagaacacttttagctttaccaaaagaaaccaatgcagagagcgttcagagagtttccacacaccacgcttctttttctcacacaaatagcaacacagttaacagtctgtctgctcctggcttttttcacctcaaatcacttactcgggagatcattccctagcaggacccccagagccgcctcagctttctgacagtggcacggcactcctcacactgggcgctccatagcttacctggcccgcgctttcctggggacacacctggacaagtagagctgtgggatccagtcctgttagcacagaggctgggccagagggcatctgcatcgatcattttcataggaattgatgagctgtcctccaaggaggacgtgcatcgtaacctctccccaaaacagaagacggtgcgccctgcccagtcccctcctgcccaaatggtagatgatcagactccaaaaaaagagccctcacacaaaacagccctttcctcttcctgccccagaccacccatattctggggggttgctttatttatttatttatttattttgagacagagtctcactctgttgcccaggctggagcacagtggcgtgatctcagctcactgcagcttccgcctcccgggttcaagtgattctcctgcctcaccctcccaagtagctgggattacgggcacacaccaccacgccaagctaatttttggatttttagtagagatagggttttggcatgttgaccaggctggtctcgaactcctgacctcaagtgacctgcccgcctcagactcccaaagtgcttggattacaggcgtgagccaccgtgctcggcttggggttgtatttcaagtggagcagaatgtcctggatcctctggacaccccggtgagtaattctatatactagcaaaaaatgatcacaaacagaaattcgaaaatacctctaccatatcttcaaaaaatacaaactaggaataaatagaacaaaagatgtgccaagacctgtatagcaaaagcattaaacatggctgagagaaatggaagatctcaataaatggagaggttttagatcatgtggcaggagactgaatctctcccaactggatctatggactcaatgtaattcctgtcacatccccagtagggttttttttttttttttttttttttttggtagaaaaggacaagctgattgtaaaattcatgggaaatgcaaaatatctagagtaagcaaaacaactgtaaaaaaggacaaagttggaggactaacttgacctgattccaagactttttttcgtttgtttttttttttgagactgggtcttgctctgtcacccaggctggagcgcagtggcacgatctcggctcactgtgacctccaactcccgggttcaagcgattctcctgcctcagcctcctgagcagatgggattacaggcacccaccaccacacccagctagtttttgtatttttagtagagatgggtttcaccatgttgaaccaggctggtctcaaactcctcaagtgattcgcctgcctcggcctcccaaagtgccgggattacaggcgtgagccacggtgcccggcccacttactataaagatacagtaatcaagacagtggcaccaagctagacaaatagataatggaagagaaaagagagcgcagagatagccccacacacacacgaagaacgggtttttgataaagggcaaaggcaattcaacagagtaggaatctgcaggattcttcctctctcatttctgctgttggctatgtgtgtcttctcttttctccttctggatcagcctggctagaggtttctatttttttgagacatggtctcactccgtcacccaggctggagtgcactggtgtgatcatagctcactgcagcctctacctctgaggctcaatcaatcttcctgcctcagcctcttgagtaactgggactacaggcatgtgccaccacgcacagctaatttttgtatttcagtagagacaaggttttgccatgttgcccgggctggtctcaaactcctgagctcaagtgatcgcccagcttggcctcccaaagtgcatcgattttctcgacgttgccaaagaaccaacttttggttgctccattttccttgtttttctattttctatgtcattgattgctgtgagcttaatcacttcttctgcttgcttgttgttgttgttgctgagacagggtcttactctgttgcccagactggagtgccgtggtgcaatcatagctcactgtagcttcaaacttctgggctcaagtgatgttcccacttcagccttcagagtagccaggactgcagacgtgcaccgtcacacccagctagtttttaactttttgtagagatggcagggggggtctcactatgttgcccaggctggtcttgaactccttgcctcaggtgatcctcccatcttggtctcctaaagtgttgggattacaggagtgagccaccacacttagccttactttggttttaatttgctcttttccttttagcttctaaaggtagaagctgaagcagtgatctgaggcctttcttcttttctagtatagatattttgtgccagaaatgttcccttacagacactttagaggcattccacacattttgatatgttgtactttcattttcatttggttccaatattttctaatttcccatttgatttctactttgatcccggtgttatttaaaataatactatttactttcctaatatctgggggattttctagagatctttctcttactggtttctaatacgattccgttttggttagagctcacatctgtatgacttgaatagttccaaatttattgagacttgttttatggactaaaatatggtttatcttaataacccttccaagtacacttgaaaacaaagcacagaggattctttccacaactgtcagttaagtcaagctggttgatgggtttgttcatggtttcctatatcccggctgactttctgtacacttccatcagttacagaaggagaagtgattatacttgtagttttatttatttttccttgcaggtctattttttgcttcatgtattttgaggctctgttattaggtacatacatgtttagtgtttttaatgtccttccatagaactgacccttttaccataatgaaataaccttctttaatactgttaacattctttgttctaaaatctattttgatactaatatcgtcatcccagttttctttggattagtgttaatgtggtatatgcctttccaccttcttacttttaactcttttgtgtctttataattaaagcgagtgctccttggaggtgagcatttattcaacttgaagaatctgcccttaaaataagggtgtttatatcgtctgcatttaatatgtgattattgataggaagtttaactctgtcctctttccattttgcttttcatttgtcccttgtatattttgcccacccccgccaattctctcattttctgccttcttttgggttgataatttgtttgtttgtttgttttgagacagagtctcgctctgtcactaaggtggagtgcagtggcacgatctcggctcactgcaacctccaccacctgggttcaagcgattctcctgcctcagcctcctgaacagctgggattacaggcacccaccaccgcgcctggctaatttttgtatttttagtagagaggggtttcaccatgttggccagcatggtctcgatctcttgatctcgtgatccgcccaccctggcctcccaaagtgctgggattacaggtgtgagccactgtgcctggccgggttgataattttttatgattccattttatttcctctgtcaccttatcagctattattctttgttttgttatttcagcagttgctttagaatttatatttatagtagacacccttaacttatcactgctgatgttctaccacttcgtgtacaatacaagaacttacaacagtacacttccactcttcccctcctagactttgtgccattgttgtcacacctacgatctttccatgtcgtaatccccaagctacatttattcttctgtttaaagacagttatctttcgaaagaattaaacaaaacaaattttacatatatagccatgcagctaagtccttccttccttggtgtatttccatctgtggtcacttttttttttttttttgagatggagttttgcttttgttgcccaggctagagtgcaatggtgtgatcttggctcaccgcaacctccgcctcctggattcaagtgattctcctgcctcagcctcctgagtagttggcattacaggtgcatgccaccacacctggctaattttgtatttttagtagagatggggtttctccatgttggccaggctggtcttgaactcccgaccccaggcactgtctttttatctgaaagacaacctttcatattctttatagtgtacctgctggtgatgaatgattaaaccttttgtatttttcaaaagtattttacctttgttgaaataattctgtttgaattatgttgaaataactctgttgaataattctgttttttcttctctttcaatactgtaaaggtatttgtccacgatctgctcactggcattgcttctgacactatgcctgctgtcatctttctctttcgtcttcatgtgtcacgtgtccttttatccccatgtggctgcttttaacatatttgtccttatctctaatttggagcaatttgaatcctatgtgcctgggtgtgtttttgtttctttttctctcatgtgtcttgtgcttggagtctattgagctgcttgggtgtgtgagttcattgtttacttcaaatttggaaaaagttccctcattatttcttcaaatatttttcttttcttttctttttttttttttttgagatggagtctcaccctgttgcccaggctggagtgcagtggtgcgatctcagctcattgcaacctccgcctcctgggttcaagagattctcctgactcagtctcccaaatagctgggattacaggcacccaccaccatgcccagccaacttttcatatttttagtagagatggggtttcaccgtgttggccaggctggtctcgaactcctgacctcaactgatctgcccgcctcagcctcccaaagtgctgggattacaggcatgagccaccgcacccagccttcaagtattttttctcccctccccctacaatcgccccctcttcagggactctacttacatgtatattgggctgttggaagctatcttgcagctcactgactgatgttcttttaaaaagaattctttttttttctctgtgtttcactcaggatagtttctattgagacttctctgagttcactattactttataacatttaatctaccctcgatctcatcctgtgtatccgtcatctcagacactgtggttttcatcactggaagtttgatttgggttaaaatgtaaagaactgctttatgctaaaatatatacaacaaaatttatcatattaaccatttaaaaatggacattccagtgggctttcaaaatatcttctgtgtctacatttaactttttggacatatggaatacagttttaatgattcttttaatatccttgtctgctaactctaacatcggtgttaatccccagtcaattttgataatggatttttctcttccttacgggctgtattttcctgcttctttgcaagactgggaatttctgaatggatgccagacatcatgaattgtacttgttgggggcgctgggtagttctgtatcctggtcttgagctttgttctgggtgtagttaagtcacctggaagcagtttcatccatccatccatccatccatccatccatccatttatttatttttgagatgaagtcttgctctgctgccaaggctggagtgcagtggtgcgatctcggctcaccgcaacctccgcctcccaggttcaagcaattcttcctgcctcagcctcccgaatagctgggattacaggcgcgtgccaccatgcccggctaatttttgtatttttgtagtagagatgggatttcaccatgttagccaggttggtcttgaactactgaccttgtgatccacccacctcggcctccgaaagcactgggattacaggcgtgagccaccacgcctggcctcaatgtcttcaatgtggatgttcttccagtctctgcctgagttccctctccctgccccacagcctggaaacgctcagtgcaagaagctggggcaagtatagggctcatcccatctgtttctcatgctttagtgatcactatcatttattacctggtgtctggttgtaaaacctattactttatatattttatcttttctttcagttgtttcatgaggaaaggtaaatccagtttctgtttctccatcttggccacaagtagaagttggagcagaagtaggcattattattattattttttttaattttcaagttccttttctaatggaaaatcgcaaacataaagcaatgtaaagagtaatactgtattagtctgttttcacgctgccgataaagatatacctaagactgggtaatttatgtagaaaaaaaggtttaatggactcatagttccacatggctggggaggcctcacaatcatggcagaagggaaagggcatgttctacatggcagcaggcaagagagaatgggagccaagagaaaggggtttccccttataaaatcatcagatctcatgagacttgttcactactatgagaacagtatgggggagaatgaccccatgattcagttatctcccactgggtccctcccacaacacatgggaatcatgggagctacaattcaagatgagatttgggtggggacaaagccaagccatatcaaataccatgatgagctccatggtctaccctgaagcttctgccatcgtccatctcatcgcattatttttaataagacaaagaccacacttccctgactttacaccacctcacttctcagggatgctgttaagagttgaccccaaatgggagtggaaaagtgacactgcaccctcgcaggacagggatactcccctcatcaaatccagggctgggaccacagtccccagtccccaggctcattcgcagaagcatggctcccactgtctgaaccgcaacatggttgccaagactttccactctgagtccttctgaagtttgcagtcacaattgacaagatatgggtgacattgatcctgaaaaggaagaaattctggtgtttctaagagtgaaatttaccccaccctgcccttcccctcccgtgtttgatggtgagtgtgccccgagcagctatcctggcttgcacagatactaccagagcagacaagggtgattaacaagtaattcatttagtctccatcataaccacttagcaatccatttcctctctatttcctgttcagagacctttggatatgccaatctgaataattgattggagcagaaaagcctcatgcctttgaagtccctcattaattacctggacaggaagaaggaagaatctctactcagccacaaagcggctaaacacgatcaaagaaaccatacccggctttgatggttccctccgttagccagaggcaccatttcccctcgaggctggaggaatgcttctggaaccctctgagctgctgctgaatgccaccaccattgttatcgggtggtgccaccatctactctaagttaaacacaccgggctatgattgatggagaggtgtctgcagagcatctgttatgaagctgtgattggctaaattgtgtccctcttaactcctatgctgaagacctaacctccggtactcaagggtgtgactctatatggagacagggcctgtagagaggtaattaagttaaaaggacatcatgaggatgagccttaatcccggctgactggtgtccttataagagctggagatgaggccgggcgtggtggctcatgcctataatcctagcactttgggaggccgaggtgggtggatcacgaggtcaggagtttgagaccagcctggccaaaatggtgaaatcccgtctctactgaaaatacaaaaattagccgggtgtggtggcgggtgcctataatcccagatactcgggaggctgaggcaggagaattgcttgaacccaggaagtggaggttgcagtgagccaaggtcgcactactgcactccagcctgggtgacagagcaagactcttgtctcacaaaagaaaaaaaaaaaaagaactggagatgaggacacagacacacatagacagacgactacgggaggacccagggagaaggcagcgcctacaagccatggaaggaagacccagaccctgagacaccttgatcttggacttctggactccagaactgtgagagtcaacgtctactgtcccagccaccctgtctgtggtgctttgctggggcagcccgaactaagacagatgccacaccctggaatagctgcagggctgggagggaagctgcagacaccctatgtatttgtccaacccaaacacgtcaaatggactgagctattcaaaccaaaactcagcgaggagacgggcaacaaaagagttaatggggagacaggatgtgaaatgggtctgggccatcagctgatggccagtactggaggctgggtgcaaaactgccgtgaggccagcagcggggtggtggagtctggctccgatcctgcctgcaatggatccagtgaaagggtcagggcaaagcttccaacaaggataacctagaaagcaggcccgcaggcagctgtagctgcagcctcttccgcgagacttaagctgaggaggctggagccagggatccttcgaggggcggcgccgtctccagcaccaggaagaatcttcacttcctcttcgaaaccgccctggaagtgagcttagggacagagctcaggcaaggcagtgcctcactcggtgggtgaagcctccttgcctctctcacagctccctgaaagctccttgcagagaacttctctgtttaataacctcggaaaagcattaaaagcgagtctgaagaactcatttaatggattcttggaggcggctgcaatcctcggagctccgtgaagctggggaacttattcttggtggagcctccagctggagagaaactgtttgaatttccccaaagccaattcgagttgttgttccttctgggaggatacatctcccagcacctcccctctcccatgtgggcagcggattcctgccccccccgcccacttcctcccggccgggagctgttcttttcagcaaagccacgagtagcaggcaggggcgccccaggccaggcatggtccgtctggaagaagccaggttcagggagcaattctgcaagataaaccaccctctggagggtgtggctccaagactttgattctttgagccaccatggctagacagccccctccttcctttctgacagaggacttgagcccttggcaccgcaacccagctgtttatagatggctgagaagcctgcctgtgtccagcaagagtgcagctgtgtggccagtggactcagcatccacgtccgagggactgctcacgttctctgaagatgttcaaggctgcccatgtgccctttccccgttttcaggcatgcagcatgcaggccccactcctgccgctggacttacagtgaacggagccaggaaagcgaatctgccttgacttgtcctggattctgcaggaaggccccacctgaaccacctcagtcccacagagagggggatcctctgtcctctcagggccaatcggactgaggacagtcccaaacccccgggccatcccgagcctaagtgtgtagtgaccccaggggaggctggtggctaagccatgccgctggggtcctggggggtcaggctcgggagcgtctggggtgatcctgctcatgcgcctcatggacgcatcttgccccggtttccaggtgcggtggagcggggagctccggggctggcagagtgagcagggcctgggtcctgagggagaaggcggctcgtaggctgctgtgctgggcagagggtggatggcggggttgaccaacgatgaggccccaggaagagaggcatgggtggcgctgccggccgcttccccatcttacctctgctggtgccgcagccctctcctttctgtggcccctccccacgtggaggataccgaggaggttaggacagccctcgggctcaggagtgcccagtgacccagtcctggccaatcaggggttcccgtttcccaggccacagtgattggttgagggatggtcatccaggccaatcagaatcctgcctgggtttttcctctacatctactggggaagatgctctcctgtccctggggggctgtgatgctggcagatgtgtgagcacggagggggttcctcagcccgggaaaaggctgaggccggcacaaagaagcaagggcaggaggtcagtacgaggagacggggacgacggtacagagcaagacagagacactcaccgagacagagacacagagacatagagagagagagagaagggagtgagagacagagacaggcccccagcaccattgtggactcctgcctccagctgttgagtctccccctgcacattattcacctatgaaacttgagctgttcggttgggcctcataagctgtcgctacctgactgttttttgacctataaaaatggcagcttcacaaggcttgaccgaatgacaagagggaacttctgtggcttgccgccgagagtcctggagaaagtaggtttggctggcggccacgccgacccgcaggagtcctgcccctttgaagcccttccctcttttagatctgccgggtttacaaggggcccaggtcgctcccgttcttgatgattaattttctaaaactggtatttctaattcctgatggtagaacttcaggccccagcgcctccctagggtgcacgcgtgggtgcccctgacccaggatggatactgtctggctctctttaggagctgtggtcaaaggtacccctgcttgctgcaggaccaggaccggggtcccactgccaggctccccagggaggccttgccctgaaaggggccctgggcagcccgagctgtgaactcctcctttggacagggctagctcctcacctgctctgctgcaggcccgggtctgcctccacagctgcggcctccagtggtgtgtgtgggctgcagcttcagacagggtcaccctccaggatcactgcagcccagctggctccatgagagggagtgccaaggggctggaggatgtgggtgtactggagtggggagtggggagtggggaatggggtgtcatagaccgaggccctctgggaatcaatgcccactcacacccggggcccacacccaccagggcctcacactgagctccctgtggagctatgggtgcagttccagggacatacactgcttgtcacccaactggaaatatgggtggggctctgagagtggacagtttcataaatcttgtagttatcttgtgcataacataactatgctgcatcttgggggtcaaagcactcctgtgcggtggtgttcatgggtgttagcatttctttcttctgaagcaatccaggaggctcagaaaaccacagcagctgggtcctggaggcggattctagggaatgactctccctggcttcccccaaggcctctctgaccctgtccagcctctcccccactccctggaggtcaggagtgtccactctggggtcaaggctgggctctgcatctgcacccgtgtttgtgactctccattgccctgcagaagatggcatttaatcctccccgctgcgggccaaggacagtgttgtgagcatgaagtaagcatcaaataccttgtgggtattcaccttagaggctgagtgacttccggtgatccacagcccgaaaatggaagggcagagaatcaacgccaggctctcggctaggccactgggcccagccaggccttctgcagagaaagggcatggcagcaggtcctggatacttggataccatcgtgctactttttctttgaaataaaatgttcattttccagtataaaagtctagatgctacccccaccatgtgccccaccccagcaatagctggctgagctggagtggtcccctgaccccacaggctaatacagtggccttgggtctagggaggagaggtgagctgagcctagcaaattctgtccttggggcagaaccaggggatccaggtgtctgtgcagggagctcagttggaggcccctacaggcaagggctgaggtcgatactggaggagtcggcaaaggagggtggtgcgtgcagggagaagtgatgaaccctgaggagagggaggggtgcggcatcagggggccccaaggaggagtggagacgaggggagagggaactggaaagcgagagaggaggaggaggggtagggctgggtgctgtgggctgaatgtccatgtctctgcaacattcctgggttggaccctaacctccaatggcatggtgttgggggtgaggcctctgggaggagactgagcccttgtgatgggatcggtagccttataaaagggaccccagagagctcgcttccactttctccctctgccacttgagcacagcgtgagaaggcggccatctccacaccagggacaggccctcgccagaatccggccctgccggcatcctattctcaggcttcagcctccagaactgggagaaaatcaacccctgttgggttttgagacggagtctcactctgtcgcccaggctggagtgcagtggcacgatctcggctcactgcaacgtccacctcccaggttcaagggattctcctgcctcagcctcctgagtagctgggattacaggtccccaccaccatacccggctaatttttgcatttttagtagagatggggttttgccatgttggccaggctggtcttgaactcctgacctcaagtgatcctcctgtctcggcctcccaaagtgctcgaattacagccgtgagccaccatgcctggtcacccctgctgttttgaagcccctccatctagggtattttgccctagtggatttagctgactcagacagaagggaagggaaggaaactaagggaggagagagaagagggaaacaaggagagaaagcccctctgttccccacaacattccacttccggcttcacagaagacacagggatggttggcaagaataagaaaagaggcccaacatcaggggtctccagggaaatgtgagctaaagtcacaatgagacgccacctcacactgttccaaatgaaaaagacggcacacaccaagtgccggcgaggcccaggagaggctgacccgccacacgtggctggcagggatgcaagatggtgaggctgctttggaagaccgcttggccgtctctcaaacttacacatccatctatcacgtgacccaggctttcctcttctgagtatccaagagaaatgaaggcacctaactaccccaagtctagtgcatggacattcacagcaactttatgcgtggtaggtcggagtggctgcaaccaaacgcccatcgatcgtgactggtcaccaaattgtgggccatcgacatgatgacggcccatcactcggcaacgcgaaggaacggactgccggaacacacacgcctcagaataatcacactgcctgagaggaaccaacccaaaaaatagcttcagtcgcgtgactccattttatgtgatgttctagagggtgcaggctgctgtgatgtgacggagctgggcggtcactgcagcggtgggggcggggcagggctgtgatgtgagctgggtggtcactgcagcggtgggggcgggggggctgtgatggagctgggtggtcactccagcggtggggggggggggcgggggcaggagcaagccggctggtggatggacttgtcaccttgaccttggcgatggtttcccaagaatacacacgtgaaaacttatagaattgcacactttaaatatgtgaacttgactggacattgattatgccccaataaagtttttaaaaagtgtatcatgatatgaccgataccacaggagaggttgccccatgtgtctgtgtgtgtgggggcggggggggggtggggcatggcatttgatataaagaaaataggagttactgggaccaagacatgaagatgaccccagtggcccctcctacattgaccagatcaagcttcaggttctgggagagagctggagtccacatcccacgcaagcccctggctgcccctgagggtgaggaggggaaacggggcgccagccgatgccccaagcccccaaccccacacctcacttcagccaacggccacttttatgttctgtctgacttagagtatgcaaagtacttctcacaccgaagacttcaaggcacacttaccatcctggtgacagcggaacccgctgggggccctgaaaggcctgggctgatgatgtggtcttgggctccacaccctgccccaggggcggatggcgctatgccagtttctctccagccaccaagacccatgcacctggcccccagcccgggtccttctccaaacatggacacttctcaggaagtctgatctcctcctaccagcgccgagggatggccaagcccccagcatggtgctgatggagaactcggccagttcctcttgtctatgaccacagggctcacagcactcatggcggcccctgcccaatctctcttagaccctgcctcagtttaccctgctgatcaatctccagatgggccgacacagactgcggaggtgtggcccaaagccagcccatgcttgtttggggcctttcttctgagcttccccacactccccacagcctgctgggaactcataccacagggcactaaattccccaccttccccactgggagaggcaacatcagggtagggggtgggggtctttggaggcaggagaacaggctggcttgatgcctgcttctgctccatcccagcactgcaactgtgactgatcacctaatgtctcccattcattcattcagtcattctttcactcattcatctgactctggggccatggctcctcccattttcacacatttgcactttgccaggggacttctagtgactgtccctttgcccatgggggtggcgtgccctgaagggtcccctccccttctctgactctgcatgcagccctggctccaccacggagcaggaagagaaggaggggctggctctgatgggatccaccctgtgcactggggaccaggccgttctgcagcatggagcacagaccgggggtctcagtctatgaactgggggattaggtcacatgtttgctgtagtgcgaggacacccaggacatggaagcccctctgaaaccattatggttggcagccttacaaaactctgaccccaaacctcgctgcccggcaagctttctttgctttccttccccatcctcttcattttgccatgatacccggaggctgagcagagaggccccgctatgagtcccatctgtccttcaggccctgcccaaccatccccatccccacactcacacacaggaagccacacacacaaagggcacatttctgtttcaaagccttcattgcagctgatcctctgcggtgcattcaagctgggccctccttgctccctgctctgggtggggacaaggacatcacactgagtgggaaggacactggggtccaggccaagccacccaggcgggcagcagaggaatggtcacccaacggtgactgtcaaagtacaaaggccagccggatgtggtagttcacgcctgtaatcccagtactttgggaggccaaggtgggcggatcacctgaggtcaggagattgagaccagcctggccaaaatggcaaaaacccatctctactaaaaatacacacacaaaaaatcagctgggcatggtggtgggtgcctgtaatcccagctactcaggaggctgagtcaggagaattgcttgaacccgggaggcagaggttgcagtgagctgagattgtgccactgcactccagccagggcaacaaattgagactctgcctcaaaaaaaaaagaaagtacaaaggccaacagagtcagccccaaagcggggacacagagtcccctggggtggggaggagacaccaggcttttctttatcattccctctgcctccacctttggtgtttccacatgtgttttgcaatgtgtgagcgctttacagactgcaagtaagtcgacactcaggtggtgggtggggggcgcaggatgagatgtgtggagactctagggctgtgaggtggctgctgactggcttctgcatagcccccgcccgtggtgggtgatggggtggcaaacttggggggcgtgggctggatagggtggaggatgctgagctcctgtgaggttcctcggagctaggctggggccctggtaggttttaattccttacggcagaatcccctgggccgtgctgcagcctggcagtgtcaggggctcagtaattatttgttggtggagacacctgagcattgagagtcaggaatgagcttcggtgtgctgcatgtcccatttcccagagtggaaatgtgttcccccctctccccacaaggagagcatttcacgggcttaaattttggcagacagactcttggaatctgagcaccaggccatttgtgtctacggggaactacctgtccctcagcacttcttacaagccctttgttgtcacaggtgctgggatgcagacgaggaaaggagaggctgggggtacagacacggaagctgcaggtgaagatgtggtgcagagccctcctgcgagggacagcaagcggctgcggcagaccccatgcacctcctggggagagagccgtgccagtggggagcactggacttagagtcaaaaaacccacactcatgcctgtaatcccagcactttgggaggccgaggcgggcagatcacgaggtcaggagatcgagaccatcctggctaacatggtgaaaccctgtctctactaaaaacaatacaaaatattagccaggcgtggtggtgggtgcctgcagtcccagctactggggaggctgaggcaggagaatggcatgaacccgggaggcggagcttgcagtgagccgagatcttgccactgcactgcagcctcggcgacagagcgagactccatctcaaaaaacaaacaaacaaacaaaaaaccccacactcccaggcctaactctgcccttaccagcctgaagaagctacctggctctcccagggcctccgtttccccatcagtaagactgggatgcccagggctgctgtgaggcaacgaaagcccctgcaaacaggtttcatcatacccttatccctcacttttctcccctactaaatagggcagtagtgctgccaactctgagggactgtgaggggggccatgagtcagcaacaaggacacagcaggcaggtggtaaatgcctggtgagtgctggtggctctctagaaataatgagtatcacgcagttagcggaaggggtggccaggacactgtgggagcccaggagagcgcccgtcctgcacctgccacggaggccacgccgctgtctccctccctggggatgagctcccccagtgtccccagccccacatcaccagacgccagcctcttccctcagtctggatacagtgacacagacgtgacaccgtggagcccagacagccccaggaggactcgtgatccccgtggggtgagaggaaggaagagtgactcagagctgcatttttctggaaagcatgataagggatcatcagtgtcaaaaccccgagctccaggcaggggccatgatttctccagtgaccccaagaccaccaggaatgacccaaccatgtggagagtgaggagggccgtggccacgcctgtctccttggtggagccacttcatggcacccacggaccacgagacatctctgggctggggaaagtcacatgattccctgagcctcaattccactgcaaatggggaccaaaagccacaggcgggtttgcagaattgagccaggtaacaggcgtggggtcctggccagtgaccacccccaggcccacaggcactgctgctactccttttgcaggggaatcatcctttcctgatgtgcacaaaatagatgaggcaacagattgatttgaggggccaggactggtttcccacccaggcccacccccacctgagcattcaggcactggactcgtggctccctgccctggctgcactgtaccccacagccaggtgggctgataaacggaggtaaactgtgggtcaccattcctgtgttacagtcccgacccccacaacctcagaacgtgactgtatttgcagatagggccttgaaagagctgattaaattaaaatgaggccattagggtgggccctgacctagtaggactggtgtcctttaaggagatgaggacactgacacactggtggggatgacctgtgaggggacagggagaaggcagctgaatgcgagcccaggagagaggcctcaggaggaaccagccctgttccatcttgatctcccattccagcctccagaatgtgagcccaccaacgtcccgtgtaagccgcccagtctgtggggcgttgtggtcagcctgagctgactcagacacacgaagacacactgacttagtgcggtgccatggcatctcatacactgtactctcgccattgcacagacagggaagcggcctacagatacggcgcctgtccaaggtaggactcgaatcccggcaggatgcctgcagggcacactgtacttcccagaaccacaacaggctgcaagaaacagagactcctgctcccccaagacaggaggaacgcagattgcttttgaacttttattccagccccgcaagagtgggtttcaggaatggcaccttccctgctcacctgaggatggtgatgttgttggcacagaaggcgaggtctcagggggacaggcgcatcacgacgcacagccttcccatcctggaccacagcattgcacggcccaagagctcgtggccacgacgggctccggaggcccacatccttcatttgcaccattctggtactgacagtggttcctcccctgtggagtagacagcgtgtccccgagaaggtggggggccctgggccacgtctcacaggcagaaccttcatctcacaccatcatgaaccagccaggtgcgtgacctcatgcttggtgtcatcgaatctgctaatttacatgaaatggagcaacaggatggcccatggaagattttagcccagttcagagataaccaagagattggttttcttctcaaagggggatgattgctctttccttggaaatgttacttattcatgatggtttagatgtcggggatgcaatgagcccagagaccatctgccgggtcactctcagctcttccctggcctccccacaggatgggcggcctccccttacagcgcattcccacacacctcagcaccagccgggcgaccccatccaccctctgcccagctgttgctgaataaagggacgtgggaacctgaacacagaggagcatgaatgcaggtgagaacgaggcctgtgctggatccaggggagtagaaacacagggctgcacaccctaggccctactctgatttattaaattaggtcttgctcagtctccaggtccagctcacccctggcaaggtggccaagggcatggatgcatccccagtccaaccctgccctgtgctgggcgtggggcatcatatttctcaagaaaatcatttccagccagtgagctcactgggctaccttagcaactacatgaaacacagatcaaagtccctcataggagcatgaagtgtccctgaaaaggcccagctgtgggacaggacaatggtggctgcctctgaggacagccagaagaggctgcagctggcactacatcccttcccttccttctgcccagaaagtggcgcttgcaggccaccccataaggcaaagcccagtcttgggtgatggtatgaatgtaagacaggcatggatgaggctgggccccaggtggcatctcccaggcctgggcggtgatggcatgaatgtaagacaggcatggatggagctgggccccaggtggtgtctcccgggcctgggccggatcccaggacccccggtgtccccgggacctgtcctgtgcaggtcagcctgctgtggtcagcaaagccacggctgcaagatgtctacgccctaatccctgggacctgtgtgaccataagccgcaaaagggactttgcagatgtgatgaagacctggagatggccctgatgttcagcgtcatcacaagcgtcctgataagtggaggaggagccgggaggagcagagctggagaggtgaggatggaagcagaagttggagggatacgctgttggctggagatggaggaccacaagccaaggaacacaggcggcctctagaaggtggaaaaggcaaggaaacaggctctcctggagcctccagcagaaaccagccctgaccacaccttgactttaggccagtgagccctgcattggacttctggctttcacaacgctaagataataaacacgtgttgctggaagccaccaggttcgtggtgacttgctgccaatgcctcagccacgggaagtgcacagctgacttctacaaggctgagaacatcagaaagccgtggacatccaccaggctgctgcgaagggacactttgcagaccagcccctcccttttggtcattaataaacaggggcgtggggtggctgggctgaggcacagcgcagccttactggctacattttgcaactgaagaccctgtaatgagccacaaggtgagagctcagccctgtaccccaaatggccccagtgtccagggggccaccagcagggtgtctctgaacatccctttgtcactgcagaccgtgccagcctccagaatgctcaatcgcgtcccttaccctcctgcaggatgaaattggaccgccaatgagcggcgtgggcctgcagcctgggctgctggggacccggccttgtctgggcagtctgggtctgctcggtgttgccagaagaaattgtgggcacctggtggcacccacgggggctcaagatgaaggaggagggagtggtgttttgccaggaccaaggacagcgccgtggcactggctcagcggttacaggagccacttcctcccactcttcaggcctgaggccgcttccccgctgctggctgcccagccagagccagggctggggcaggcgggaacagcgaggccagcaggccacgggccacatcttcatgccaccctgagaccacaaagcctgtgctgctctcaaagtctggagccagtttggctggggggaccctggggggctcacctcctgttccctctgtgggtcccaggatgctgcagcacacacgtgtgggtatacaccccacactcctctgtcactctgccctgacctggagcccaccaggtccaggggctctcaaagttctggctcttccccgtcatcagcacctaagtgttcgtcactgcgaggccttctgaggagccaccagggaggggggatgccagatctaggggcaagaggcacctggaccaagaatagattaaggttcagggcactcccttctccagaaatcaccatgaggatctccatcagggacgacggcaaaagtaagtctagcgtttgaagggcaagggaagaaaagctcttgtagtcactgaaataaaaccacaaacctgactggctgttccagtaccttaggaaaggcctctgccttcctcaaagatggcatcttcctatctgaatggtatattttgtgttacattaaggttgttggtgcttcagtttttgttactgttttttttttacttctcaccaacaccataactcactgtactttaaagctagctaggccaggtacagtggctcatgcctgtaatcccagccctttgggaggctgaagatggcagatcactcgaggttgggagtttgagaccagtctggccaatatggcgaaaccccatctctactaaaaatacaaaaattaaccgggcgtggtggcacgtgcctgtaatcccagctactcgggaggctgaggcaggagaatcacttgaacccgggaggcggaggttgcaatgagctgagatcgtgccactgcactccagcctgggtgaccgagcgagactctgtcaatcaatcaatcaatcaatcaatcaagctagctagctgaaggcaaagactgaagttggggcctggtgcacacagcagcattccatgagtatagagagtccagccctggaactggaggaactcaccccaagcctcactctgccagctctgagctgtgtgagcggtatggcccctgggaagccacttaatctctttggactatgatttaatgtcctgtagagcaaagctcctgatctcctctcttgggcacacgagggttggggccgtaaatgtttgccagctctgccccgagcctcatgcccacagaggccatcctgcctcccctaggagctgctggtcaatgggaggggacagatcccgggccaggtccagtctcctttccctgccgaagagctgaggccagaggaggggttggcctggggagacagcagacagacccagggcggagagtccaaggtgccatcagtcagagaaggccttgcaaagaaagcagagaggggctccaccccagggggccaatgccgccatcctcatgatgagaaggggcctggcattggcaccagctgaaaggaccacctaactgtccccacacatccggggcctccaagccgctaactctactactgctgactgaatgccgtggaggccgccagccccggccggatccaattagctcatgcacacatctgcaagtgacgggagggctgggttgagatgctctctgctaggcctgctcggcagatgggacccactcagcttccctgtggagtccctgagccagtgtgtccctctgagctccctatagaggcggcaggcagcagatataagctcaggtccatatctgaccagtgcgtgcaggctaggcagcgggaggatacgcaaacctctcccctcgttcactgagggtggccctggagcgatgggccttcacaggtcctggtgggcacccagtcgggtgtggggatgcagggtctcacttccgatgctgtcggggtccctgaaggggccttatcccagagatgacagccgaaaacacagcgtgtcacaggcagcatctgtgtgtgctatggtggtgttctagaagctggcggagcttcagaaccacctggggggctttagacaaatgtagaccctgggccctctccctggtgatctgagtcagtcagtctgggctggggatgggggtggggtgtgcgtgtctgatgagcaggaccctcaggtgttggtgaggtctgagaagccccaggaatcactggcagggtctgctgtgcagctcactctcctgaggcttgcagcaggctcgtggggccagggtgctgccctgtggctgggggtgcagctcagcactctgacagccacatggagcgggggacagagggaagattgggggagaatctgcatggtgcctggccctggggcaggggcactgggctgtggctgagaacatgtaagggagttacggaggccagagcggggatgccttcatctatctacgggctcaggtatggctccaaagatgggggattcccaggctgactccagaaggcctagcagcatgtccccaactgatgcaagaggtgggaggaggccttgctggcagagggagcatgtggcgagaaggtgacctggagggcaagggtacagggccaggatagagccagaagatccagccgcagaacaggggccagcgtgtggcagcagcatccacagtgccctgatcttcggggctgtggcacaggcagagggagtccagtcctgccctgtgcctacagcacagcaagtgctcggtgaatactggcaggtgcgattttcatgagctctgattcttgcaaggggctggctgacttctggctccaaggagggcagtgccaggaaagcgcagctaaatgccagctgcccagatggcacggaaaacatgcactccgggtcatcgaatcccaaattcactggggttgagccccctccatcttgagtggctcaggataaaatctggagcctgtccactccacgctcactgtcaggagcctcctaatgaaccatcgaggctgtgtgtcccttctgcagtcttttgtccacccagtggccagaacgatcctccgcaacccaacaagatctcaccatcaccccacggtataacgtctgcgggctgcccgctcctcacaggtaaaagccagcatggcccagtggcccacaggttcccacggcctggcccagccatgcctcccctctctcccttgccactctctgcagcttgctcagcccagctgcacagccctcctgcttccctctaacctctgggcatggcctgaccaccgtgcatgactctgcagccaccgcgagcatgctcctcaaggtctcatccccggccgacccccagagccattcaattatcggccgtgatggctgcctgtgactcgggtctacctgccagcgctttggctccactctgcccttggttggcccctgatgtgtccccagctctgagagtggggcctggatcaagggcacacttgcgggtctggtgagtccgaaggtaggaggtagttactaagccaggcatcctggcgctcgaatcacatgcagggctgagtctgtgttccgatcccgtgtgacaggcctatcatctgtgtcttttattttctctttctgatgctctggcatccagggttttgctgaccctggagggatggcccctcaagaatcaggcaattcctagagaaagtaaacagctcacctgagagctggattttcaaatgctaaccaactaaaacagaggccaccccacccctcctctatccgggtcccatgctcccagccactaaccctgcccccatcaccccagggctgggtaccggacagccagggacaggccctaggccccagagctctgaaatgattccagctgccaacgctaaacccacttacactgcctacttagtctgctccttcctgcagaaatcatggtaaagctcctgtccacatttcccccctctccctctgcctcctaatggaccttgtgcttccctgaatggcccccaaggcatggcctcccctacctcctgggaagagtgagttagcagctgtccccctgatccgttggtctcgccatacctgaataataataaaacctacattttaaaacactgcggtacacaggacctgcctgacaaaggatccaggaaagcaagtccctgaaggcaattgttttgtgtcattccactacatgttctgaaaagagtggcagtgctggcacggtctggtgcatgctggtgcctgagatcgtcagcggagacgcagaggcctaagggctggaggacaagcccctgagctccgtggctaccaccccaggggcttggatgcactggattttgtgtgtgggggcatggtgaataccgcctcgcagcccctctgagctggcacagctcaggccacagcacgcccactctggctcaagggaaatggtgccaggctctgggccctgggagaccgcctgactcgagggtgggctcctgatcacaggtggtccatccactggctggcaggggctaaagccaagagctgatgcaaagggcactgccaatggggcagggatgaccagtagagccagctggatgggctgatttttgaagcagagaatttgggaccagtgacaatagaacagactggcagagtggggcagggacagcatgagggaggaatggggaagcagccagtcggtaaagctgccccaggtcctcacagctctaagtcccaggccacactgccctgcaatactctccaatttcacctggcatttaacacaaattgaccagaatcattccctgttctttgttcctaataaggacaggcttgcttttatccagacatccattcatccatccacccgcccacccactcattcattcatccatgtattcacccatccatccatctctcttttcatgtatccatctacccatctatccctccatccattcatccacccaccccactacccactcatctatccatttgcctacccattcacccactcattcgtccatccaactagccatccatccatccatccatccatgcattcacccatcctctatccatccatccacttaactacccaaccactcatctatccatttgctcacccacccacccacccacccatgcatttgtccatccaattagccatccatccatccatgcatccacccatcctccccccatccatccatccacccatccttcatccattcctccatccatccatccatccaacagctatctgaactgtttaatgacaacctcccatagggagacagctgggaaaaagaccgattcaaccctgaccttgtggagtttgcaacctgcaagtgacaactgaacaagtagccacgagtgtggtgaagtttcttggagaatcgcacaggtgcctgccctgggttgtgtaacatggtggaggctattctaattagggggaaggtcagggaaggcttctctaggatgtaactgtcaggactgaatgtcgcccaggagtcagcaagggagagaggagtgcttgaggaaagagagctgtgaggtgggcagtgggggcagatcaggaagatgggaatggggtgcctcctcagggaccctctggaagaatctttaaaagctgggcacaaggatcacttgcgccttagaaggcttgctgggggcaggaggggcaggtgcgaatgagggaggttctggggccggggtcacctattggcttctcttaaggcgtggccggggctagtggcaaggagggccccaaggtgctgcatagcttgtcactcagagctgggcagcctggacacactactcttcacagagacctcggaagctaactccgaggcggcccctgcatggctggccaaggggcacatgctgggacgcagactctcagtacagatcgccagcctctggcaccgttgctgtggaaaccaactggcaatgagaaatttagcaatttgaaaaaagcatttccttcccttatttatatctcttgacccttatcctaggggaatggcgagggaagcacggctcgcagctggagccgggagtgggcaggtgtctcgagggtaccgctccccggaacggggaaggacaccagtacctcacccccccagagtgggcagagcctagagacgccatcccagaatacgtcactcctgggaaagatgaaaataatgcagaaaaggcaaagtctccctcttccctcccccacctcactcctctcccagagacgacctcaaacgtcactccgaagattgttattcgaggtcattctccatgcaccgctgggcacatgcaggaatacagacacatgccagtgctcttgttgaacaaaatggggtcacactctagcccatggctcctctgcagcccactccctttgctgagggcctgtgttgctctcccgaccacaacactagggttgttgcgtcacttccactgccgtacagagttccacggcgagctgggccgggctttatgaaagcagttctctcagatgtccagggatgccacgccacatgaatcaccaagaaatgaagcaatgcacttgccagtccctcctctaaatgctttctctaaaggcagcctggccaacaggacccctaactagacaggccctaatggggcagaggggagaagcggggagagcgatctggagaaaggagcctgtcgcggcaccacgggtacatctgtaaacatgagagtcagggaaaaacgaaattggtctggggcattctacgcagccatcaaaggcatggatgacagtgcttaccgacaggaaaaaatattccccacatgttcagaaaaaaagggtaggttacaaaatggtatggaacagcgagtccgacattcagagaaaaggtataaaaaagatgcagaggcatatcttgttttattaccccttgctttattgtgctttggggatactgcatttgttacaaactgaaggtttatggcaacccattgttgagcacgtccagttttttttttttttttttttttaagagatggggtcttgctctgtcacccaggctggagtacagtggcgagatcacagctcactgcagcctcaaactcttggcctcaagtgaacctcccaccttggcctccccaagtgctgggattctgggtgtgagccactgtgcctggcctgaggcaagtaaatctgttggtgccatttttccaatagcatgtgctcacttcatgtctctgtgtcacattttgacaattcttgtaacatttcaaactttttcagtattatgatatctgtcatggtgatctgagatgactgatctttgatgcttctattgtaattgttttggggtgccatgaactgtacccatataagacagagaaattaactgataaatgttgtgtgttctgactgatctatcaactggctggtccatcgtctcttcccatctccttgggcctccctattccctgagacacaacaatatagaaattaggctgattatagctcttatttcacatgccaagggaataaaaaaagaaataaggccaattaatgatcacacaatggcctctaactgctcaagtgaaaggaagagtcactcatctttcactttggatcaaaaactagaaatgattaggcttagtgaggaaggcatgtcaaaagctgagataggctgaaagctgagacagtcctcttgcaccagtttagccaagctgtgaatacaaagaaaaagctcttgaaagaaattaaaagtgttactgcagtgaacacacaactgataagaaactggaacaaccatatcactgatatggagaaagttttaactggtttggatagaaaatcaaattgtccacaacattcccttaagccaaagcctaatctagagcaaggccctaactctctgcaattctatgaagactgaagagctgaggaagttgcaggaaaaaagttggaagctagcaacttccatcaagtttaagaaaagaagctgtgttctgtaacgtaaacacgcaaggcaaagtagcaagtcttgatggagaagctgcagcaagttctccagaggatctagttaacttcattgatgaaggtggctacactaaacaacagattttcaattgagacaagacatccttctttttttgagatggagtcgcgctctgtcgcccaggctggagtgcagtggtgcggtctcagctcactgcaagctccgcctcccgggttcatgccattctcctgcctcagcctcccgagtagctgggactacaggcgcccgccaccacacccacataattttttgtatttttagtagagacggggtttcactgtgttagccaggatggtctcgatctcctgacctcatgacccttccacctcggcctcccaaagtgctgggattacaggcgtgagccactgcgcccggccaagacagccttctattggaagaagatgccatctaggattttcatagctagagaggagaaatcgatgtctggtttcaaagattcaaaggacaggctgactcccttgtgaggggctagtacagctggtgactttaagttgaagctggtactcatttcccattctgaaaatcctagggccttaggaattatgtgaaacctactctgcttgtgctctataaatggatcaacaaagcctggatgacagcatatctgtttacagcatggctatttacagcatgaatattttaagcccattgttgagatttactgctcagaaaaaagagattccattccaaatgttactgctcatggacaatgaacctggtcacccaaggtctctgctggagatgtaaaaggaaattaatgctgttatgcctgctgacccaacagtcacttacagtctatggatcaaggaataattttgactttcaagcctcatatttaagaaacacattttgtaaggctatagctgccataaatagtgattcctctgacggatctcggcaaagtcaattgaaaaccttctggaaaggattcaccattctagatggcattaggaacatttgtgattcatgggaggaggccagtatgtcaacatgagcaggagttgagaagaagttgatcccatccctcatggatggctttgaggggtgcaggggaagaggtcactgcagatgtggtggaaacagcagaagaactagaattcgaagtggagctggccgggcacggtggctcacgcctgtaatcccagcactttgggaggccgaggcaggaggatcacgaggttaggagatcaagaccatcctggctaacacagtgaaaccccgtctctactaaaaatacaaaaaaaattagccaggcgcggtggcgggcgcctgtagttccagctactcgggaggctgaggcaggagaacggcgtgaacctgggaggtggagcttgcagtgagctgagatcagagattgcgtcactgcactccagcctgggcaacagagggagactctgtctaaacaaacaaacaaacaaacaaaaacagaagtggagctgaagatgggacttaaacgctgcaatctcatgagaaacttgaatggatgaggagttgcttcttagggacaagcaaagaaagtgatttctcgagatggaatctactcctggtaaagatgctgtgaacattgttaaaatgataacaaaggattgagaatattccataagcctagttgataaagcagcagcagggtttcagagaaaagactccaattctgagaatttctgctgtgggtaaaatgctatcaaacagcattgcatgctacagagacacctttcatgaaaggaaaagtcaattgatgtggtaaacttcattgttgtcttattttcagaaattgccacagtcaccccagccttcggcaaccaccgctctcatcagtcagcagccatcaacattgaagtgagactctccaacagcaaaattatgatgactcgccgaaggctctgatgattgctagcatttctcagcaataaggtattttaaattaagatatgcacactgcttagacatgatgctattgcacacttaacagactacaggataaacataacttttctatgcactgggaaaccaaaaaaaaaaaaaagtgtgcatctcgctttaatgtggtatttgctttcctgtggtggtctggggctgaacccacaaatatccccaggtcggcctgtgcagaaaacaagagctgagagtcatcctggagttaacgaggctcctcttggggccaaggctttcatgcctggcagattcattgcttataattagtatccctctccccagtagatgttatcttttaaaaaaggaaaagacaaagaaatggagggaaagggaaggtctacaaatgggtcagaaaaaggaaggtagagaccaggcatggtggctcacgtttgtcatcccagcactttgggaggccgaggtgggcggatcactggacctcacttgaggtcaggagttcgagaccaacctggccaacatggtgaaaccctgtctctactgaaaatacaaaaattagctgggtgcggtggtgagtgcctgggatcccagctactagggagattgaggcaggagaatcgcttgaatctgggaggcagaggttgcagtgagcagagatcatgccactgcactccagtatgggctacagagacagactctgtctcaaacaaaaagaaaaagaaaaagaaaaagaaaaaaaagaaaaaagaaggtagaaaagaaagaaccaaaagatagaagaaggagccggaatccacagagccaatctgtgcagataaattacaggagtaagcgcattgccctggactcaaacgctgtcaacttctggagatacaacatttgcttttcttaaaaaagaaaaagaaaaagaaaaaaaaagcaacatcatagctccatttttgtcttctccaaggaaacataacacatttcaacaacttaaaaagggacaggaagaccatgtgaaaacatcctgaaatagtgttttctctcaagggcagacctgagctacactgatctcctgaaacattttttaaaatgcagagatgtgggccgggcgcggtggctcacacctgtaatcccagcactttgggaggccaaggagggtggatcacttgaggttaggagttcgagaccagcctggccaaaagggtgaaacctcatctctactaaaaatacaaaaaaatgaggtgggtgtggtggtgtgtgcctgaagtcccagctactcgggaggctgaggcaggagaaccgctgaaaccgggaggccgaggttgcagtgagctgagatggcaccatccaagatcgcgccatcgcactccagtctgggcgatagagcgagactccgtctaaaaaaaaaataaataaataaaaaataaaaataataaaaaataacaagcagaggtgtggagactacatttaaacagggcatgcaggaagcccagtccctgtcaagcctctaatactctcctgtggctcaggctgtgaattgatgtgtgctgaccgccggcctcctcactctacctgctccgtcttccctctgcacgcaggggacaggggaaagacagaggcagctgtcgctggtcccccaggggacagccagggcaggtgaggactgggtcctgcctggggaggctggcactgtctttgggtcagtccgagaggagatgcagtctgctcccactcggagtgagaggcaggacttctgctgactcgggtggagcttccacgcaggcttttgggtgggacgtggccaccaatctgatgcagccaacacagactcaagcagcacacacccagctctgcatcccagcacaccccctccagccacggccaggggagtctttctgaaggccgtgcggcatctcggtggccccccttctgcccaaggcgggtcttgggcagcctctgtccctctgtctgcaccccccgttgagggcaaatgtgtgcagccctggtcctggcctgcttcacctcttagaacaagggctgtgtggttaggccaactccctcctccagccccctcccatttcggcccatcatctaagcaacagtggctgcgtctgcccttttgctatggcccaaggcagctgcggattcccatccatgctccttcagccctgcagccatgtccctctgcatgcaccttcagggacccgatgtccagcagagggacacccagacatccccacctcgcctggggtagcactcagggtttccagcctcctcggccctgcccccaggcctgtcacctacgtgatgcaaccccaagatgtccagcaaaccctcgccgaaaggagggactcacgaagggagcctgcagctatcggaggggtgggtcccagccctggcctcgcatgaaaaacttcccacgtctgtctggccccatagttcggggaaggcctgtggctgcccctgctgcctgtcaaagtcctcccagcaccatttccaacatgaacgcacactgtcccagcacgcgtaggactttggtggcatttttggctaggtgtagctcctctacttattatattctataatttctcagcagtctccacgcagttctgagaactcttgctgcattgagaaaaatctaacctacagcctgtttttaaatgaatgttgcatttaacagtgaatgaaggtaggatatagtaattaaatatttactaatctgaacattcttgctgcctttttttattctggggctgtgaaatgttgtttctagatctggatcctggaatgctcaagagctcttacaccaaagtggtcctggaggaggctggtgctgtttcatcagactcagcctcagtttccccacctgggcatggtggctacctcgcctgcctgccccacgggacgtctgagcaggtgtgtcagaaaatactagagtggcaggaaggcacctcccacacctacaacacccccagggagctctgtccacaaccaactcctgttgagtgaatgaacggagtgaagagtgagctaaagggcattcagtgtcaggaggcctggggcagggttgggcaggttacattcctgactttgtgggcaaacggagtgtccaccttctcgagtgacaaggactccaatctggatccctttggcctcagctggagggacctatgcaactgttatcattagttccttcgttcgttcgttcattcattcattcattcattcaatgaattgctacagtccagatgctgttctaggctctggtgatacaatagtgactgatgcacatgtgggacctgctggtgtcagatgctgagtgaacccacgtggagggtgtgaggaagggatacaagtgccagggaggggcttgcagaaagaagggtggaccagatgtcctccagggcctcttcctaggcactgccgtgttggagctgcccgattcgtaaatcgctgcttgctcacatcaattctttaaaattttattgtgcctcagctgactttataaacaatgcccatccacagatgaatgagtcaacagttgtggtctacccacaccattggatatgattcggccacaaaaaggaccgcagctttgacatgccggggcgtgggggatgctcagcgacttcatgccaaacacgaaagatcgcgttacgtgagtccacacacggttgcccttggtgcactctggagatcggtcccaggaccccagcacagacccaaatccaagaatattcaaaagtcacacagttggccctgaggaacccacgtatatgaaaagccagcctcctttctacgtggggtgggttctgcattccacgaatactgtatttttgacccatgtttggttggaaaaaatctgcatgaagtcaacccaaggagcttgagtatcaacagtatatgaaaagcctggaatagacacacttttagaggagaagtagcttggtggttgccaggctgagggcgggcaggggcaatggggctcaggtgcttactgggtccagggtttcattctaaggtgaggaaaatgactgggaactggataaaagttgtggtggaacaacaccgtgaacctcgaaatgtcactgattatacacactgagtgaatgaatggagtgaagagtgagctaatgggcattcgttgcccatcacctaagcaacagtggctgcgtctgccctttcgctatggcccaaggcagctgcggattcccacccatgctcctccagccctgcagcccatgcccctctgcatgcaccttcagggaccccatgttcgtggttcattttacctcagtaaaatttcaaaaaaagtgaccctgaacaaatgatgagagaagggcttcagggccgggagccgggagccgggtctctctgagcccatttcctggcaggcttcacatctgggtgggcctcattcttcctcattccccaaggtggtttctgcagcctgcagggccccccacctctcagccctcacctgccaatgggcccaaggcttgctctctgccagggtacaagaaaaacccaggctggcccctcacatcggccaccggatggagtggggggtggccctccaggcagctttggccaggagggcagtttgaagggtgcagcccggccgtccaccccgaccccctctcaggaagccccggtgccagtgccaccctccaagcgccccctcgcagccagccgaggccgctgcgtttgttaaaaatacgcagcaccatctgcagcaacttggaatttaataaatttatttataaagcgactgaggcttcttttaaagtcgagtttttatccctgagatgaggctcctgaggcctatgaggctcacccagcttggctcactctctctgaaaaccacacgctggcccagacaaccctctgcgaaggcgacggtgaactgtggcctggagcccagcctacagcccctgtcacaggagaggtgagggaaagttgagaaccacagggcttccacggctcaggttcccctggaccgtgttgaatggcatctgcccaaaattcgtgtctacccacaaggggcttgccagcccttccccagctgctgggaggccccaccgccccgggtagcgggggaagattgaggctcacccagaagtggacttcaccaggaaatgactcagagagacccagctcccagccacaaaacccttctctcaaactgcggattgtggcctgatttggacacggggtctttgcagatttagttaaggtaaggtcatgctggattagggtaggactttattccagcgactggtgtccttgtgagagaaaacagagcggggtttcagtcgcaaacacagaggagaacatcgtgaggatgaagcagagattgcggtgaccacctccacgccaaggcatcaggggcacctcgccaggatacgggaaaggcaagaaggcccctccccaagagcctccagagggagtccacccagctgacaccttggtttcagaattctggcctctagagctgcaggaggatcaatctctgcggtgctgagctgtcctgcgtgtggtgatttgtttggcagcccaggcgagcccccttccccgcctgctctgtggggcacctgggccagggctgggccagagcccggacgcttcccagtgccatggtgcctcctgctgacttcaattcccacaggcagacctggcgcctgggaaccaagaggggaggggcatgggcaccagttccggaaggagccacaggcaccaggcagagaaactgtccagggtatttccaagggacaggccagggtgggtggggcaaagggaaagagctctgaggaccccctacccgggttctagggttctggggttggaaggggcatcagggtcctggtctgggacccacccccaccaggccttgctatgccaagaggactgcaggactttcctgaagtagaaaccactgagggcagaatcctgatgcgggggggcggcaggcccagcagggcaactgccaggacagcagggccagtgcagcgcagggactggtggctgccccttccctcaggccttccttccttcctgccttccctgggctgctgcaaggctcaccttctagaccacaacagtccactctctccggggtcacgggcactttggtggggtacactcaggggctgtctggagctgtgctctcccccagtgtgaggaatcatcgaggcttctcggaggaggagagaacagaggacagtgcgtcgggctgtggcacaacatgggcacaggcttggaggcaaggggcctttcccatgactgaggtctcctatggtctatatctattttgcaagcgcagacatcctcagatcctatgaacaaagctgcatacttgtgcaccggtgctcgggggtgactggtctatatctgttttgcaagcgcagacatcctcagaccctatgaacaaagctgaataattgtgcaccggtgctcagggggtgactgttccctccagactcaggggcgcagcagcacagaggagcaggtttcgcacaaaatgggcacaaggtcactgagcccatgattactcctggcactcatgccaggctcagcacccgccgccaggggaaactcctccctgtccctcattctctctccacccactgccccccgcctttgagctactcccttccactacccaggcaccccataataactgtggagatgccaagaagcagcaagtacttagtagacacaggaaacctggaggagccctgggaaggggttgcctctttgccacaccatggatttggggctcacagggaaagccccctgagaggcggccagtggagctggcggcggtaagataagagggtagagaggatagagagggtagagaggatagagagggtagagaggataagagatttttctttacctggcaaagtcctcatgggacttctgagcaggcatatcagaaaataccagagtgatgggccgggtgcagtggctcacgcctgtaatcccagcactttgggaggccgaggtgggtggatcacctgaggtcaggagttcaagaccagtctggccaacatggcgaaacctcatccctactaaaaatacaaaaattagctgggcagaatggtgggcacctgtaatcccagctacttgggaggctgaggcaggaaaattgcttgaacccaggaagcggaggttgcggtgagctgagatcgcaccactgcactcgagcctgtgcgacaaagcaagactccatctcaaaacaaccaaccaaccaaccaacaccagagtggcaggatccagaccccttcagaccccacctgagatgcaacccctgagagaggccttgcgggcacccctgcaccaaccaagtctgacagcagctcctggaagctgtgcttcgtctctgcacagcacacagggcaatgctgtccgctaactgcccctctggacactcaggggtggagtgggctgcagaactctggccatgcgctggagtccagagccagcaggggaacgtgccgtagacagggtcccatagaggggcagatggagcccgtttgcagctgcaggcgatggggcgggacgaatgactgaggtcatttgtcgaatgacctcagggccacacaagttgggctggagagaagggtattggaaggtggagaagaatagaggaagaggctggaaatggaggcttggcagggagcccttgactatctgggaaggagctgaaaatggatctgaagttagcacaaatgacacaagaaaaaataaaaactcgaagagttctgtaaccttgaaagagattgaaccagaagttgcaaatcctttcataaagaaaacatgaggcccagatggctttctgagcagggtcaagccatcgcagaaggaacacataattctaacccgaacaatgtcttctggagaaaaagagagaacactccccagcttcttgggagactggcaagagcttgactccggttggaaaagaatggcctcagaaaggaaaattacagacaaatctcactcatgaccttggatgcaaaaatcctaaacacaatattagcaaatggaatttggcaacatattaaaaagattactacatcatgacaagtcgggtttatcttaggaagctaagactgatctaacagaaacatcaattaatacaattcattagcaaagaaaagccatgtaatttttgcaagtgatacaaaaaaggacttgaggaaattaattatccgcttgcaattaaataaaaatctcttgcacactaggaaaagaataaaatactttaacctgataagctgcatgtcaaaaaaaaaaaaaaaagactagagtcaacagaaattttgaaagcttttttttttttaaagatcaagaacaaagcaggtattcccactattcccacttctattcagcattttattgcaggtcctagctagcggagaaaaaaagagaaaggaagaaaaaagataatcagtcgataaaagatgagaattaataagagaattcagcaaagtggctggataaaataaaaatcaatataccaaagccagccatatttctacatttcagcaagaatcagcaaatgcaattctgaaaaatatatcatgaagtgacatcagtgaaactacctaggaataaatctaaaaaaggttttgcagaagctctttgtggagatacttaaaaaaccagtttgaaagagaaatgtaggcagggcgcagtggctcacatctgtaatcccagcactttgggaggccgaggcgggcggatcatgaggtcaggagatcgagaccatcctggctaacacggtgaaaccccgtctctactaaaaatacagaaaattagccgggcgaggtggcgggcgcctgtagtcccagctactcgggaggctgaggcaggagaatggcgtgaaccccagggggcggagcctgcagtgagccgagattgcgccactgcactccagcctgggcgacagcgagactccgtctcaaaaaaaaaaaaaaaaaaaaaaaaaaaaaaaaaaaaattggctgggtgtggtggcgggcacctgtatttccagctactcaggaggctaaggcaggagaattgtttgaacctgggaggaagaggttgcagtgagttgagattgtgccattgcactccagcccgggttacagtgtgagattctgaaagaagaaaagaaaagaaagaagagggagaaggaaggaaggaaggaaggaaggagagaacgaaagaaagaaataaaaagaaagaaagaaagaaagaaagaaaaagaaagaaagaaagagaaagaaagaaagaaagaaagaaagaaagaaagaaagaaagaaagaaagaaagaaagaaagaaagaaaatgtatcatgttcttgaacaggaagacaacattgtgaaggggttaatttttcccaaattggtctattctgggtcaatgcaattctaaccaaaatcccaatagggtttgttgttgctgttttgttttggtgtaacttgataagctgattggaaaatacatatggagcaggcacggtggctcacacctgtaatcccagccatttgagaggctgaggcgggtggatcacttgaggtcaggagtttgagaccaacctgaacaacatggcgaaaccctgtctctactaagaacacaaaaattagccgggcgcggtggtgcaaacctgtaatcccagctactcaggaggctgaggcatgagaattgcttgaacctgggaggcggaggtgtcagtgagccgagattgcgccactgcactccagcctgggtgacagagcaggactctgtctcaaaaaaaaaaaaaaaaaaagaaaagaaaaagaaaaagaaaaaaagaagaaaaagaaagaaaatgcatatggaaatgtaaagagccaacgattgctcaaataatcctgaagagataaaaggtgggtgggttgggggtgaaggggagaaatattcagaggtaatgaaggtggtgctcagatagacaaatggaccaacggacagccacaccacagacctgcatccatgtggaagtttggtttatgacgcctccagcacggaagatcttggagaaaagtgttttattccaccaatgctgctggaaggatggggtgtcctcaggggaaaaagtgaaattagatccatgcctcacataacacacacacatacacacacaatctgaattcttggattaaggacttacatatgaaagacaaactttaaactcctggaaaataagattgggaaacagctttacaaactcttgggagaagataatttcttaaataagacagaaaaatcacaaactctgaaggaaagtttgataaattcatctacattaaattagaaatgacttgtcataaaagaatgaaaagacaagctaaagattagtaaagagaatatatctatatctatatctatatctatatctatatctatatctatatctatatttgagatggagtcttgctctgatgcccaggctgagcgcagtggtgtaatctcagctcacggcaatctccacctcctgggtttaagcgattctcatgcctcagcctcctgagtagctgggactataggtgcatgcaaccacgcccagctaatttttttttttcttttttttgagacagagtcttgctctgtcaccaggctggagtgtactggcacgatctcggctcactgcaacctttgcctcctggattcaagtgattctcctgcctcagccttctgagtagctgggactacaggcgcatgccaccacacccagctaatttttgtgttcttagtagagacagggcttcaccatgttggccaggatggtcttatctcttgaccttgtgatccacctgcctcagcctcccaaagtgctgggattagagatgtgcacaaccgcacctggccaatctttgtatttttagtggagacagggtttcaccatgttggccaggcttgtctccaactcctgacctcaggtgatccacctgccttggcctcccaaagtgctgagattacaggcgtgagccaccgcgcccggccagtaaagagaatatataaagaacacaaatcaatccgaaaaggatgaacaactcagtagaaaactggcagaagatgagaataagaatttcccagcaaaggcaccacaaacagtccagaaacataaaagatgctcaagtccattagtaatcaggaaacgcacattcaaatggcaatgaaaaattattaagtacctcccagattgacaaaagctgccaggtctgaaccagaacaggggcagctgcagcatggagccaggagacctgccacccaggtggctggaacgcagctgatacagtttggatatttaaccctgcccaaatctcaagttgaaatctaattcccaatgttggaggtggggcctggcaggaggtgtctgggtctcagggcgggtccctcgtggcttggtgctgtccttgcaatagtgagtgagttctccggagctctggttaagtgcgtggcagctcccccttgcttgctttcgctcttgcttctgctgtgtgaactgcctactcccatttcaccttccaccatgagtaaaagctccctgagccctccccagaagcagatacaggcaccatgcttcttgtacagcctgcagaactgtgagccaattacacctcttttcttataaattacccagtcatagatatttctttacagcaacacaagaagggcctaatgcaactccctgcagagaggtctcggcctccacgtggtagagctgaacacttgcctcctagtgatctagcagctgctctcctaacacctacactcagacatcaggagaatacgcaggagtgctcagagttcctctgtttacagccccccaaaccaggagggggtcacacgtccctcagcaagagaacagacacatcagtgatgggacgggtcacaacaccagaccccagattcccacctccacgaggctctggaaacaaaaacatttcatcctcttcttttcggtaattatactggtggcaacgcctgtatttactctctgcatttatcccactgaatagttggacattttgatgcagaaaaatcagtgtgcttgattacatgacatgattggactggaattatatataaaatacataaaatgttacatcctctgaaatttattttatagtataaattgtataacattacattttacaatattaaacaaatacatgcatgatgtatgtttattctgaaatgcacgtggacccacaggctttggatagcgactaagaagctgtctatcatatgatagagtcctacacaggtgggaaaatgaataaacgagacacacacaccggggaggcagaaccccagagcatactgctggcccgtggcagaggtcggcaaagaatgcaggtggcaaatgtccatttacagaaagctggaaaacaggtaaacgttagctttgtttagtgatatcaacacaggtggtaaaaccccaaggaaaatcctgaggaagcggtggtgggggacccctcacagccctactggctctgcacggtgtcccttggctcaggccagcacctccgtgatgcttccatgacatggggagaaaccgccaaccatgggccatgtacaccagatgggtccaggcccagatggcagttgagcccgaggctcaggccccatgagcagttgtgggcaggaagcttggctgccgtcctgagaccaacaccaagccacagccatcaccgctcctcctccaggcttcccttcctcctctggggcagcagcccatcttcccagctgcccgaaggagaaaggcatatccccagtgtccctccacatcctgaccctgaccctgtccagcagctggtccacagctgcagtaaacccagagtccagcagaacctttgctcagtaggcacacaaatcattcttgagcaggtgagccactaataatgtgtcactgacaccaaggaacagagggttgagtgacttgcttcaggccacacagctagtgaggtactgagctgggacctcggagaaggtgcctcctccatgctaggcagccctctcctgggccagtcctgctccccactcccaacagccttggtgctttcagaaaaactcaagaggcgccaggagaatcccacagtcccccttctcagcctaatttgcaggcaaggaaatgtctgtggagctctccactcatcaggatccatcccctgcccaggggacaggcagagacctgcccgatgccctggtggtggccgcaggaatgctgagcagatggtgcttggcacccagaagtggggtgaggagagcagaacgacccgataaaattatttatgcaaatatttaaccacaggcactgcagcaatgcaaaagtaacatcgaggggcccatgaaatgttagctgcctgccgccccaagtgcctgtgtgcagagccagcagcaagccagagagggcgggagggtttggggaggagacggtgccttggagggagcagcctggagggagggacagcccctctgtctctgcgcaggcccagctgctcaggcagagtctcccttctcctccctcctttaataaacacccatgaagggctctctcacccatggtggggcatttccatggtgagcaaaactgggagacacaagtgagcggtgcaagagcacgagagtgaagctggatgcccgtggggggctaccctgcgctccctgctcctcccagcctctctggcagatctgcacatggcagatgggaactgtggggcacacagctacgtggaggaccctccagaaccctctgccctctgaatggttgggacagtgagtccaggagggccagggggtggcctgggagaggtggtgctggtgctctgggctgcagtgggcactatgatcacgccagtttacagacataaacgctcggcttggggagggcaggcgcctgacccgagacctcctggtgagtggttgctgtgtagagacaatgaggaccgcactgaaagcagtggcaacaaagcttccccaatgtcatacatgatgcgttgatatactacacatgtatacatacaacatgcattctacatacagcatagcggcatgccgcaagcatacgcagtgcttttcataaacaaaaccactgaagtctcacaatggcccctgaagggggtcagtcatatgatcctcaccccatttcacagatgacaaactgaggcacagaagggctgagggtggcaatgggacggaagccccagtggcctggctctggccccctcccaatccatctgcactggccacacaagggtgctggacacagggcagtggtgtgtgggcagcgtgtgagtcacaaggcaggttccgcggtttcagggcccatcgggattcaccagcagcagcaccaggctctacagtcaggaccagatgggccttggtcaggcagcctggggcagggccaggggcctgcagcagccctccgaggatgggaggctctgagaatcctcagtgaagggcagggcttgagcctgggatggcgctttttaacagggccacgtgtctttctacataaaaaaagccccctgtcatgccaaatcttaaagtaaacatgcctcttctggaagatgctctccctgctaggcctggccactccatcgttgtgagccccgggggtgggaacacccagagtgagaagtgaagcctcctgcagcccagcccggagacagcctggctggccacgcccagaaggcagcaagcgggtgagcccgcgacaggcgcaccctcagtggctaggaaagggcccttggcaggaagcccccctgtgaccactcatgtttaggctggacactccacacttgcattttcctaatgcagctggtctctcaccctccagcgattagcacgctgggaccacagagccatgtgagctcctgcagatttcttaatggccggctgcctccggtggccttatttttagccatttccactctactgaccgctcagtgaagctcagatgtatcaggcgcacggggagcatgtccatatcgaactctctccaaggaggcggagggggacgaggaacgcagagctcaactgcacgtttccctgggctcattgcacaaattgagttacagatgcagatttccaacccatttcttgatgttttcctcctggaaccagagcaaagaaaacccgaggaaactgcacggcaacaggccccaggacggcaggtgggctggcagcaagaccactttcttatctagagctggatttaggggcctgaagccagcgaggaaggaggaaggaggaagcacaaatttaaatgacccttctagaacaacctattattcccccccctccttggggtaaaaagatggcatgaagtaccctcagttaagaatcctggggaaagataaccatccgagggtcgggctccccagacagacgacagcagatcggggctgcttcatgagtgctctgctgccaggaagtgtgcatggcaggggggcagctggaaggtcatccagagccaccccaataccagcaaagaccccactcaaaaatcagcccaacccatgtctggaaatcagctcttctggctccattgcccatccttcccccaccttttccactgaagagactcctactcactctttaaagatcctagcatgaacaggcttggttgctcctgcctttgatcccaatgctatgggaggctgaggtgggaggatcgcttgaggccaggcgtttgagaccagcctgggcaatccagcaagatcccatctctacaaaaaataaaaaattagcagggtgtggtggcacatgccatcatatgacccgggggtgggggggtgtcacgtgattgtaccactgaactccagcatgaaccacagagtgaaaccttgactcaaaaaaaaaaaaaaaaaaaaaaaaaaaaggccctagcttgtatcctcagccttactgtgcagacttcagagtttgaatcagcaggtcctttgtggggggccaagtcctgcagtacaattacccctcagactcccctcctgggcgtctgtgtctttgagggcctgtggtcatcctcaccatttctgtaacttctaggtcctggcttggggttaggagctgcccaggtgcaagatggaatggaccgtctgctccttgggcctcaggcgcttctgcagtcctgattcctgttactgggtcaaaccgcagcaggaagatacggaagggaggtgcgctaggtgatgtctctgagcaaccctgttcttcggctgttttcatccttcagtgcaaagcccttaaatctctgcacagccctggagaaggatgaggctcgggacctgagttcccagtcatgtcgtctgtgtctgcagctcctagacaggtgcctggaggggcaggccagcaaggggtgcccacccacttggcccctccacatagccggggtcagtggaagtccaaaatccacactcggatctgaggcctcagccctcttctgtggcccctcagacgggggcggccttcctggaaacatccgccttcctccccgggcaccaacagcaatatgtgccttttcaggtctgggaagaatgtggctccggggtctgggtactgcagattgcccaggtcacgtaccctaggtcctaggggaattttaacagatgaactggtttccaggctgaactctgagcccagcctccgtggaaggtcagaggtgaccagctggcagattctaagaacctggccactttccggctcctctctccctatgtgcctgccccacacccagctccccaaccaagtacatgcttggccaggtcttcccggaagtcagaggtgaccaactgggtcctggtcaccatcacaccccactccctgccctcaggtgcccattctgtgcccagcacctgcacgcacacactggctctagggcctgtttgccagcatttactccctgggcccacgggtccagggacttcttggaaaatgcctgtggccgtcagcaaacagagcagatcagcttggaagaaggcatggcctccctgtatacccctggcttgtccaaggagaacaagggcaactcccaactccccacaccacagggcccccaggacatgccaccatcctgtgagcaggcagtggccagctctgctctgtgttgaagcagcagcaccgcctaatgccagcctggctggccagttccgagagttggggttaagcgggagaggccccatgtggtggccagaaagagaccactgagtattctgtctcttggacaacatatagcccccctttcagaaagaagaatctggttccagctccatccttgcgttcctgtggggcagcatgagcagctgctcatttccacagttgactctgaccagagaggctgagtggcttgcccagagtcacacagaaaaggcagtgccagggctcctgaccactgcccgccatgtccgattcctgctgcctttgccagataaaggtaaatgtgccagctgctcttgtgggaaatcggaatctgaccctaatttgcaagagatttttctttttctttgttttcttttagagacagggttttgccacgtagcccagcctgagctcaagcgatctccctgccttggcctcccaaagtgcttggattgtgggtgcgaaccacctcacccagccagaagggatatttctttcctctttgtgaaaagagctactattttcagctactgactgggctacaggaggagctccctagttgaacacgtagggggcctgcaggcttccaaggccacctggcgatgggaactttttctctcgaacaccccagctcctgatgggggatcatggggtctggagggtaggtctgcacctctgagttctgggacctgggctaagtcacccagcctttccctgagcctcagcttcttcatctgtaaaatggggtcatgtaaaggctctgcaggtgggcaggacacagcactcggcagcagggagccactgagagctactgtccctcctcctcttggccgagcctgggccccatcagccgcaggagcgctgcttcctcagggcctctctccctgcttcacccacctcgacacgggggtgagggccacgggctcccggaaacccattcacagccgaaagctcgtgctatttagtctcatctgtgtgcagccgatcagagaattgatctcaaattacaaacctctcagctaaacgcggtctattacgcaaaacctcattccagcggctataaataacccttacaacacagtccccaggaactctctggaaagatgtggcacggttttgaataacgagataatggaaacacaaacccatgctaattaatttcactgctcagagagagctcgctcctcgcttagccatggtcagtgggactcaatcaagaaaaccctgggatgaaacgggagacgtctcaagggaaacctgttggcaggagggcccagccacgtggagctgcagcaagtggtcgcgttgtttgttcacggacctgtggcaccgggcggcccagagagggcctggccggctcccacctctcaaagccctgctcggacaatgctgctgaggcaaggctccgggacggcccacccaacagaggaatcagacacaaaggcagccctgggctaggtctgacggcagatggtttcaaagcgaaagaggaagaatccgaggactcctgttgcagggtcacaggaggccccaggaggtggctttatctgttcaaattagagacccccagaaagatgatgacctggcgtgtgaagaaaccagcatgggtcacaggaagcattcagaggttcctcagtaagttaaacacccaaccaccatgtgacccagtaattccaccacacagggaggcaaaaacaagcacgcacagccatgctcggagcagccccatccgtgatggccgagaggcggtggaaacagccccaacgcacatccactggtgaatgaacaaacaaaacgtggcacgtacaaatgatgcgggatatatgatagaatggaatagatacataatatatctatattgtatattgtatatactgtatattgtatcttgtatatactgtatattgtatattcatatactatattgtatattgtatatacatgtactatattgcatattgtatatacatgtactatattgtatattgtatatgtatatagatatacataatatatctatattgtatattccataatatacaatatggaatatgtatattatggaatataattcgggcatgaaaaggaatgagacacagatccacactacaacagggataaaccttgcaaacatgacgccgagtgaaagaagccaggcgtaaaaggccacattctgtgattttatttataggaaatatacggaatcagtgcatccatagagacagaaagctcactggggatggccagggaccagggaggggtgaggggagcggctgccaggaggttcggggttccttttggggcggttaactaggtctcggtggtggtcacacagacttgtgaatgtactaaatgccactgaattattccccctttaaatggttaaaatggcacattttacattacatgtatttgaccacaatgaaaagaaaacagttatgggaccaatgggagctttggtgcccctaaaattccatcagcattgcctgttcttaggcttgttcacctcttaatacgaggcgtgcaaactcagctcccagtcccctcttgctgctcagctgcaaaaaaatgaattattgcctggttttatgagtctaatgttgtgacctgctcctgccactgatgccaaggccaggaggtctgtcagtcagggtggcacatgacacgcctgtgcccccggccagtcccactgtccctgatctcagcttctcccatgcaaactcagaagctagaaacaggctgctggcctttgttcttctctccctgaatccaaggatgatggttttccaagcaggctacatttgtaaagtaatcctcgactctccgttttatattaatgaaagccagccagagctgctgatcggctccagcggatgggacaggcccggagaattccgtggggcagccggcacaatgccagcccagagcacagaacacggcatggggctggcgtgcaggaaaaccaggcacccctgccggcccctctgggctttctgcatcttttaagcagctctcagagcccacagactccattccagggcctgtggggatccacaggactcatgccaagaatgacggaaatctttctgagctcaaaactctctgaatttgaaaaacaaatggtcctttgaagaacactgcttccatatggaactatggggcacggtgatcagaagagctccagcctctttaaaaaccagcaaatgatgcaccctgatccctttgaacgtccagaaaaaggctgaacctagagccatagtgactaagaggcaaatgcagcctttcaaaatctccacaacccaagaattgccttttcacatgtgaagccaacgcttcagaatgcaagaaaagtggcagctttcaaaaggagtttggaggttctcagatttaagcgcaaatgccacttcctgaggctggtgctaaaactgcaggaaaaggctggttggcagaagctcacaaaggggagtttatcagtgttgcaaagggcatgttcacggacacctattggtgttggccttgttctctgtggggatggtgaggcggggccagcagcctgcagggctgtggcattacccgttcctcgacagttttctcaactcatcgtcactccagccagagccctgggctgctccccacctgccctgcttccccatcttccctgcaatgccccatggcagccctgggtacttggttaccaccccacgacccacgtcctatccttcagggactgcctcacctctgggctgtttggaaggacagagtgacatgggacagaaacagagggtgtctggtttaagggctacttctgcatttatcattccattctttattttgggtctaattcaaaccatgatttcaaaaaggctaagaatgtacaaagggaagggacccactggccccagggcaagatgggagggtgtcctggtggaggtgtcgtctgagactccttcactcctctagccatttaggaagaatttctaggtagtcaagcacccaggatgggccttccaggatgaatgggggagtttaggaaactgccttcgtttctactgaaaatggagaaaaaaggcaattttcagttcttgcagcactcagcagtgtgaaactgggctgctgctgaaagggaacgagaagcctcgttccaaatttacttgccatgggaggtgggggagggggggcgggtggcgaggggcgtgaacactgggaaggcatcacagaaggggagcgtcttgagcgttctgcccaagatccaggaaggaggcggcgtccgggcgtgacacaggcccaggaggggagctggatggggtggtggggaagttgcctgcgactcctgcctgggaaccaggggtctgtgctggtggtggggcccctgtggggatgtgtgttctcacagagaggactttaataagggttttgaaggcgtcctgctgctgagtatgggaactcacacgtgctgggcaggagagaatcagggctgggctgatcagggaaacgcagaggggaaaggaagcctacctgtagcccccatctctgacagaggcaagatgaacaagcacctgccatttacctgatagcagctgcatctctcgccaggtacagctgcaggcgaaggcatgaaaggttgggtttctctacatacgtgtgtacacgtatacatacacatatgcatgcgtgcatacatattcttgggggtgttttgccttctttgtacaattacgaatatctttagatccatgcatactttctgatggaacttcatccctgaagtatgcatactgtacaggcaaggttaaacgaaactccacgaagaaaaatgcaaaacgctcaacgctccagaagcccccagcggcccccggcagccaccttcctccctgcagaggcacccggggtctgcgcgtgcaattcccgcgctctatctagcactcactgtcacctgctcacttccttaaacaatacatggattccctttgccttttttcaaattttacagatatcattttggcctttttttctttggaactttccatacgcaatatcagactctatgtattcctctgtggcctccacgttcccctccacagcatgtctgagattcacgcgccttgatgaatgcagttggcattcattcattctcccaccagcgcactgtactccacgtgtgagcaactcacggcatccggatcctttcttgttcacaggcacttgcatcatttccagcgtcttgctgttatgaacagaggtgcttggaaacttctcgtgtgtgtctcctggcccacgtgggagaatgtgtcaggggtgtgtgccatggagtcacatgctggtttgcacagcaggtgtgtctttcatattagtgggcaatgactactgttttctaaagaggttgcaagatttgggactttttttcatgtttttcttttttctttttttttgagatggagtcttgctctgtcgcccaggctggagtacagtggtgcgatcttggctcactgccagctccgcctcccaggttcatgccattctcctgcctccgcctcccaagtaggtgggactacaggcgcccgttgccatgtccagctaattttttgtatttttagtagagacagggtttcaccgtgttagctaggatggtctcgatctcctgacctcgtgatccgcccacctcggcctcccaaagtgctgggattacaggcatgagccgccgcacccggccatgtttttctttttttaaaaacaaagtgtagaaactcaaaaggctctggaagacctggccatgtgcagcagtgttatgagttaaactgtgtcccccaaaaagaggtgtggaagtcctcaccccaggatctcaggaggtgaccttatttggaaggagggtcattacagatgtaattaagatatcaattaatgtgaggtcataggggagtagggtgggccctacatccaatgactgctgtccttgtaagaagaggggaacttgtttttttttttttttctttgagatggagtctcacactgtcacccaggctggagtgtagtggcacaatctcagctcactgcaacctcggcctcccgggttcaagcaattctcctgcctcagcctcccaagtagctgggattacaggcacgcaccaccatgcccagctaatttttgcatttttagtagagacagggtcttactatgttggccaagctagtctccaactcctgacctcaaattatctgcccacttctgcctcccaaagtgctgggatcacaggcatgagccattgcgcccaaccagaagaggggaatttggacacagacacacagggagcccaccatgtgacaataaaggccgagactggagccaggcagcgcaagccagggaaggccaaggagtgtcagcaccaccagaagctggaagaggccaggaagggcctcctggagcctctggagggagcgctgccctgctgacaccctgacctttgtcttccagcatccaatgacacagtaaaagtttgctgttttaagccagacagtctgtgggttttgtttttttttttgagacagagtctccctttgttattggggctggagtgcagtggcgtgatctcagctcactgtaacctccgcctcccaggttctaagagattctcctgcctcagcctccagagtagctgggattgcaggcgtgccccaacatgcctggctaattttgcattttttaagtagagatggtgtttcaccatatgggctaggctggtctccaactcctgacctcaggtgatccacctgccttggcctcccaaaatgctgggactgcaggcatgagccaccatgtccagcccaacctgtggtttcttagcagccctaagaaataagtacaagcagcattccaggcccttccttcatcccatcctccagtctttgtctcagtgaccaaataggccttgggtctgttgctgtgagagcaaggatgaccaagcccttctgcagatctccaagagtctgtgtgctcctctgagcctggggtgagcctctgagcccttctcaacacagggctgcaggcctcccctccccactaacttaacaacacgggagtactggatgtccccatggccgtgttagaggtttctggagagggaagaggaagtgggcagctatgctgctcctggctggggggctgtggtcccagggccttgctttaatgggttaactggaaaggcaaaaggaaggaaagaagagaagcctgcttagattggattccccccatgcacagaacccattcgtggacatgccatctgcaatgcttcatggaagacatcttccgatggcagagggggatcatgaactcaacactcagcctccctctgaaccaagagctgttggggaatgagtagggggtggagaacagtgggtgggcctagaaggagaagctgaacattgcctatacacctctgcctaatgcagcccacaccccgctcctcctggtggactctgtgatgagggcctgatacctggtgtgggactgtcctctaggtggccttggacgagcccagttctcccctctcttttgctttcagttcttaagaataaccatagaatgtgctagaaatgcaacaccccgagagagggagggctgactggaatagcctgagctctgtcccagtcttccccggaaacatgatgtccatcaacactttagtccaaaagtcatatggccccggggtataaaacccaggaggagctgctttccagggtcccttagtggcggcgcaagggagcacatgcagtcaagactccggtcagctttcctgagccttacaggctggctcggccgaatcccaggcttctattgtcccttgctgcatatctgtaagcaatgaaccagttcatggaactcgctgtgtgggcggctggctcaccaggctaggacaaggtggtaagcggcgcgtggtgaacctgctccacaccttggggcagagctgtcaggccattcagtccaatcctggggtttggtggtagaaggaagcccacccacccacaggtctaagccaccttggccggtattggctttgttggcaacaagggaggaacttgctctctgtggctcttacatcctcggtctgtctctttgttggttagtggggaggtgagggtgggcaccagcatttactggggccactcagaccccagctgtccctgagagggctgctgaggaaggagtggcagacagcgtggatgccgagaccagagcctgcctctgggaaatggacagaggccttggaacccatcctcccttcactgtccttgccgttaggatgcccttccctgcattcagggcctcagctgctcatcaggatggggggcacatgagattgccattcttgtaggttgataagagttcaatatttgctagtttgacatgatgcaactgaacggaccccacggccgactgctccttgctccgataagtagctactgagctgaaggtccccgagaagtctcaatgagcagaaggcccaggccctgcgtctgttggcgaccccacactgggctgtcggaactggctccagggaccccaagaggaggccctccccagcctgggaggggcctggatggcacctctgagttggggcctacaatgagatcagagggtgagctgagcagaggatgtgaattcgagtgctaggaccgcccgaggagggcgctgggtggtactggggaggcagagacaactcaggaggctgaaagtccagggatgagggaggcagggccaggccacgaggacagaggaggcactgttccccacagaccctggaaccaggtccctggtgcccagtgctgggtcctgagcaagttctcctgagggttaaaacattcacacctgagaaggaaggcagggtggggtgtggggggatctgaggcctccggaggctgctgggtgaaggctgggagtgccagaagggagtacttccaggctggggtggcccagagcctctccctggcccaggggactcctgccaggctggctcctgaccagtccccaggcgaggggagcctgcggggcgtcccccgacaggggccgctgaggaagaggagatgacaaatgccccgcaaagggccacagggtgcagcagccaggggcagagccgtgtgtgctcctgtgtgtgtctatgatagtgtgtgtgtatgtgtgtgagacagtgtctgagagtgtgttgtgtgtcactgtgtgtcactgagtgtgtgcctatgagcgtgtgtgtctatgagtgtgtgtgtaggtgtggcagtgtctgagtgtgtgtatatgtgtgtgtctatgagagtgtgtatgtgtgtgagtgtgactgagagtatgctaatgtatgtgtgtcactgaaagggtgtgtgagctgtctgtgtgtgtgtgtcagtgtctatgaatgtgtgagtgtgagtgtctgagtgtgttgtgtgtgtgtgcatgtgtgtcactgagagtgcatgtgtgtcaatgtctatgatggtgtatgtttgtcagtgcctgagagagtatgtgtgtgtgtgtgtgtgagtgtgtagtgcatgtacatgcatgttaaaaccctttaaaaatgtaaaaatcttcctcagaaactcagtcatggatggaatgtggcccccaggccagagttcacccagccctgccataaaagaaagaaacgcgaggaacggagtggggaggtggagcagatttgtcaaaacgggcagtcagagcctctgcagagctgatcgtgggcttcagagcagagctagggggcagacgcagctgtcgccacgggaagcataggaaccctcagaaccccacgggacctacaaagcctagagcaagctcgagttcagagttaacgggagaagaaggtggccggaatgagggaaagaggctttcatgatcaaggtggagtttaccccacgtgcatatgaccaaaactctgaaaaacagtatttttctgaataaacgtctaccatgccaagcatgttagaaatgtttgattcaaagagaacacatggacacaggaaggggaacatcacacaccggggcctgttgtggggtcgggggagaggggagggatagcattgggagatatacctaatgctaaatgacgagttaatgggtgcagcacaccaacatggcacatggatacatatgtaacaaacctgcacgttgtgcacatgtaccctaaaacttaaagtataataataataaaaaaaagatgtttgattcaggctgggcacagtggctcacgcttggaatctcagcactttggggggcgaggcaggtggatcacttgaagttaggagtttgagaccagcctggcaacatggtgaaaccccgtctctactaaaaatacaaaaattagccagacgtggtggcacgcctgtaatcccagctactcaggaggctgaagcaggagaatcatttgaacccaggaggcagaggttgcagtgagccaagatcacaccactgcactccagcctgggcaacagagttaagactcggtctcagaaaaaaaaaaaaaaaaagaaatgtttgattctgatgtgattcgtgcaggggtgatttcagaaggtcagaatgaacccactgagagggaaaagtctttgaacaaaaggacaaaagtctccagagttaaccgccatttatgtctagcctaaccatctgaggaaggaacgttctagaatcccagggccaccccgccctaggttccaatgaatggcccctggctctgcccacagccaggcctggcctcacctgcaggtgatgtgcatggctcggattcagtaattaagtcataaaacacaaggctggctacttagagcagaattacgaggcatttcagcttgtgaatacggtaatccagcttaattaacaccgactgggagagcaaggcgcaggcttctgggttaaatcagcccatgcggaaaccctggccgccgcttaccctcatcacgctatgctgagcatttgtcattgtgtggaataaaaataaacctgagcttggaaaactgggcaggtgaccctggaaaggcccggaaaccacccaaggctggctctccagggcctttgtgttaaaatggaacaaatccagcaaccctgagaggcgtatccagggcaggcgagcttctctgggacaggggacacacaggctgacccggcagatggccaggagatggacggggtgaatcattgcaggtgccgtgcacagccgccccagtcccttacccacacccttcgtcctgcaggctcgatctcccttcaggacccccgctttctgcccatggccctgcccaggggaggcggaccccagcccagcctgtgacactctaaggacttcctgagggttcatcatttcagcctgacaaccacccttgggttagattcttattgctcgctgtaattaattactacaaatttagtggcttaaaacaacaaaaatgttcttacgtgccagttctgtaggtcagagggccaacccagggctcaggaggctgagagagcggcgttggcagggctggctccttccgaaagctctcagcgagggtcctttcctgtctcttccagctctggggacccctggcgttccttagctgagggttcattactccaagttctgccttggggggtcccatggacttctcccctgcatgcatcaaatctacctctgcctcccccttataaggacgcctgtggtcacactcaggcccccctaagcgatccgtgatgacctcctgattgcagcaagatccctcagttcattgcatctgcaaagccgcctttcccatggaaggcagtcggtcgacaggctctggggataagcacgtggacatcttggggacccttattcagctggccactggcaggcacaactgggctctgcagagaggctgcccagggacccttccaggcagtgataacgcctcagggcccctctcttccccatctccctcattctctttggggctgtcctggctgcctccatgaggcgtgctagtcagtgccggctcacagggaggaggcctccataacagcaaggcccttggatgctggagggtgagacgctgcccagtgtgaaatctacctctgttaccatgggacttggaggagcacgtttggggctcagctctgctaactgatgctcagggaggcaggaggggagagttttaaaagagccacaaagtaccccggaacttagaaggacacttgaggaccttgtttaagactggaacagaatgtctatcctgggagagggtgtgctggtctccctctctcttctcataaggacacggatcccatcatgagtccccaccctctgacctcatcaagccctagccccctcccaaaggccctgctcctgacaccatcctggtgggggttagggttccaacatttgagtgtgggggtcacacagacattcggtccacggcaccaagctgatgcttcctggtgtctgagatggggagaggcctctgcatagcccggctggctcttctctttcccaaggcagaagaatcattaccttgccggggcctcatcagaacaaaaatgtaattgttttgtgccttttagaaacctcctgagttgggagaaatggagattttggtggctgtccatgaagtacttaattaagcagaacaggtaatcccatcgttattacaagaaacacacagagctccaatatctgtggaaatgcagttgcctgtgggcctggaggctgcctgccccgcctggtctcccccacccccaccatgggcgccttccttcacaactatctgggttgttgcattaaggcttgtcttgcccccagacaaaatgtggagtctgttgttaccgtctgaatgtctgtatccccccaagttcctatgttgacacatttggagacagggcctttattggaggtaactcgggttatacgaggtcataagggtggggccctgatccaatgggattagtgtccttataagaagaaactccagagagcttggtggcactttcacacacactctctctctctcctctctctgccatgtgaggaagccagctgcctataagcaggaagcgacccctcaccaggaaccaaattgctggcaccttgatctgggacttctagtctccaaataaatgcttgtttaagccccctggtctgtcgaaccttattacagcaacccaaactgaataagacatgtggggtccggtatgacgtaatatctgtgtgaccacaacaggcctcagtttctccatctgaaatggggatggatggtaacagcacctgcctcaaaggctgtgggggctgaaatgaaagctcaggcaccaaggcaccgggatcgggcagggtgtgatcccgacttcacctctacaggctcacatcaatgacagcagcccctgggcagcctgctctgacctcccaggaagacccaatttctggggtgtccaaggggcagtcctagacacttgaggagattaagtgtcataagacatcagcccctcttgtcctgatcactattttgcagatgaggaaaccgaggcaggagcggccagggtactcatttgaggtcacaggtggaacatgcgaagcagaacccagaccagcttggagcccagcactgcatggctattgcttatgccctgcacaccatctgcccatttctttctggcctggctcctgcctctgccccaccacactgccagatgcacaccaaaggctgtgcccctacagcacccttggcgaggacgtggcccatggcaggtgcttgggaaatacgggtggactgggtggaaggaaggaaggagagaggggactggaaattcttcccagctccttcatttcccagatggaaggtgatttcatcagatgggaggtctgatacggtagccccagccatgcgtggctgcttacattacaaaacaacccaggcaagtgagtgtagaaggggagactctgcctgaggacgtgggtatggggaagaatgatggagatacatggggatgatccattgctgtaactcttctggagacacccataaatgatcccagaaaagcatgattgagggcttaatggcagaggtgatcaagtgtgactgacaggtgttgccgacagacatcccagcctgcacacccccaggcctggccagctcttctgtccacacaggaggggtgagggccaacttctgagctcgtttctcttcccggctctgtccacacggtgccgggaggttctggagctgagcccagcgccatgtggaggggcctggcccaccttgctgggctggctgccccaggcacattggggcaaaggggtgtttgcctgtcactagtggggtgggtgagcctgacaagaacagctggtcaaccactcctcggctccttctagaaccatccaaacccagcaggatgtccaatggaatggacgtctccaatccaacacagcaccgcaacttcccctgcctgccaaaggcttccccgtctcagcaaagggccccacagctgcccggcagtgtatggaagagcccaggactcaactcatgtcaacccccgcccccacctgtgctgtgccccaaaaccacccccagcctcagtcctctccaccccggtgtttgatgtggaacagccgccaatggggcttcctgaccctctgtgcgagtgtcctgggcttttgttacaaagcaacacaaactggggggcttaaaacaacagaaattgattcactcacagttcaggcggcctccagtccaagaccaaagcttctgggaggggccatccgttccggggccctccctcagctccaggggctgcggccaccctggtgccctccccttggcttgtaactgcacctgccagcctctgcacgtggccttctgctcatgatctcaagatctcatctcaagatccttaactataaatgacatctaaggacatctgcgaagaccgtgtttccaaatgagattcccagtggacacagttctgtggaacaccatccaaccccctactgtctccaatccagtctccgaacggaagtcaaacaagctgaacaacacacacgcgcaagcaccactgctccctgccacaaaccctgtcacctggggagtagagtctaaattcttctccacagccaggtgcggtggctcacacctgtaatcccagcactttgggaggccgaggcgggtggatcacctgaggtcaggagtttgagaccagcctgaccaacatggtgaaaccccatctctactaaaaatacaaaattagccaggcatggtggcacacacctgcaatcccagctactagggaggctgaggcaggagaatggcgtgaacccgggaggcggagtttgcagtgagccaagatcgcgccactgcactccagcctgagtgacagagcgagatttcgtctcaatcaaaaaaaaaaaaaattcctctccacatcctgtggggcctgtgcctgcctctcccacccttcccgcacttgggtgcatggcctctgcccctccaggtccccgggcggtttttgcctctggggctctaagcccacctcctccgaggttgccgaccttccctgccggccagcactgcacagctattgcttatgctccacgcaccatttgcccttttggaggatcatcgttatttattcatttctttctggcctggctcctgcctctgtcccatcatgcagccagatgcaccccgaaggctgcgcccccacagcacccttgatgaggacacggcccatggcaggtgcttgggaaatatgggtggactggctggaaggaaggaaggaaggagagaggggactggaaattcttcccagctccttcatttcccagatggaaggtggttttcatcaaatgggaggtctgatacagtagccccagccacccgcggctgcttaagtttcaattaattgatattaaatacgtaaaactaagaattagctcctcagccacactggctgcattttgagtgctcagtagctgtgtgtggccagtggtgccatatcgagcacatgggacatttccagaaagttctaccagacagagttgctttagaccaaggaaggagagagaattcagggctgtcagcattatgaaggtcccagggcatctcttccagcctatggcccctcccaggccagggcagggtgtggacagcaacagagaccccactggggagctggggtataggatgggtcacaactcagggctaagggtgcgcccagagctgccaccaagaactggagccatgggaggcagggcaccttcgtccctgtgcagggaggggcagccttgggtgtggacttctgggagcagaggccctggtttccctaggggaggggtgggcccggagcttcctgggagcctgcagcctcaggaggggctgaggccgggggagtgtgcaggactaacggacaccatgcctgccacttcctgagctgagggcagagctgatgggggcgggctgtcacctgcatggtcttattcccaggcttgcatcctacccctctcccccatggaggaggtgggaatggagcaacgcccccagccaatcccctggttccctggtgctcccaagggattcctgccagctctgcggccctcagacttgaggccagggggtgttggacacactgcacccctcacagagagaggaacaaccatcccctcctgcctgagccaggattcacccccagacatccctcagaatccatttccatctttccaaagagatgctcccatggccacaaccttcttcaaaaaaaaaaaaaagaaaaagcctcaaaccgtctttcccttaaggcagcagtcctcagccaggggtgatggtgcccccccaaaccccagggaaccagaggaggaaccagggaaccacgtgtcaacgtctggagacattcttggttttcacaactgggggctggtgctggcatggagtggggagaggccaggctgctgctggacaccccacagtgtgcaggaggggcccgcagcagagtgatcctgctagaaacgtccccggtgtcgtcctggggcaacactgtcccagttccacacctggcagggcggctctgcgaaatgcctccacccagagcctggtctctatcggctccctcacctggtggcctgcggggggtgtcccaagggttctcaccaggagtttagccaatgtacagtttgagagaacagcccccacaagaccacccttcctcaattcagacaccagctgcaagttctgggggtctccaagaccaccctcaggtttggtgatttgtgggaaagactcgtagaactcactaaaagcacctatgctcacagttatggtttattacagcaaagggatccaggctgagatcaggcaaggacaggcaggcgtggggggcagagtccaggagggtccagacatggggtgtctgccgtcctccctgggaaagtggggataagtccctcccagagatgacgtgtgacaacacgcatggggcattgccgccagggatgctcccagacctttggtgtcccgagtctttgctggggctctgtcacacactgccttggtggcagggctttagtttccagctcctcctggaggttagggctaatccttctggtctccagtttcttctggaggtccaagctgatgtggcatgacccagagctcccaccataaatcacactgtcagactgtccagcagtcaaagcccccaggcaaacagagacacatacatcaggcaggatattctgggagcccagagaccacctcccaggaggtgaaggcaaaggttagctctctctttggatcaagttggtgcttcactacccagacctccctccctccattttagatcagaaaactgaggcccagaccttaggaaatctgagcaggctctgagcagtggaggatgtgggctctgagccagtccctgcactctcctcttttactcaggcccctccgctccccaagtcccctgcctcccagaggtccacaagcccaagctgggggaaatctcagtgcagcctcttggatctctgtgcaaaaatgaaaaaaaaaaaaaaaaaaaaaaaaaaaagacacgtttgtgcataaaatacacactgtagaggaaggaaaaatgcaggaagagaagtttccagtaattcaccccatggcaaccaccaggccagcgtgggacctggagtattaatcctctaaacctggggcccctcccgctcggagggctgagggctgcaggcctctggggcctccccgcctccagttccgctgccttgttctcactcccaggcagcctccgtcccagcctcccatcccggctgagcatggtaccccgcacacacggttgctaagaaaccgttgccaagagtcacaactcagctggcaacggaaaacacccccagcagcaccgtttgctgggcccatttaggaagacatgttttctggtccactcaatgcctcatcctctttgcaaacatttcaaacgttttcttttacatggcttctagatatcacttagcatgcactctatatttaggaacggttatgaaacaaacatatcacccacaatatctgcactgactatggcatgaagcctggtactgggatcaagaggcagggagacaccagggaaaaatcctgcctcatatcacagcgaagcctggtgctcctggctgatttgggagcttgtcggtaagtctcatctggtcaagttcgacaacccccaggtggcaagctttacgccacaaagcccattggactgcaggaaacaggaaagatggacagctctagtcctcggccagaggcagagctcgtcagtcagtctcatctggtctaatcccacaaccgccgagtggcaagctttatgccacagagcccactggactgcaagaaacaggagagaccgatggctccagccctggaccagaggctactatccctgtagtacctctgaaaggccaatccttgtagcagccctgaaaggtccagatgcagccccttattctgcagaggaggagtccaaggtggcccacccacaggaggcagagctggcctctgttgctgtagtggagaaatactgcaccccaagccacatcatgacactcttcagcccagagtgggcagcctgaagaggaaagactccatcccagcaaggatgaaggctgcggttcccaggtcctccgtcagcacgtatctcatttcctgggcacccaagacagggaccccgggaggccctttggttggctttggcgcagccgtgaaggtcagatgggagcctggaggtggggggcgtgggggtggcatggtgttgggggactttgtccctgaagtgtctcctctcacagctcgctctagcactaaaggttcctgtttttgaggtttgtgatattagagttgttccccaaaattccgattttcctccttcttgggcacacacagggctgcaggtctccaccctcctgaagttaggtgcggccaagtgagccggcggctgcagggacgtgtgtcactccaggaaagatgaagaccaactcaccacccaccacactgcccttgaacccagatgtggcaactataaatggatgatggtccagctggtgggggcgtcacccaacccggttcctaagtgaggagggcaaaggacagcacccagcagacctgacagggcagtgagagtgagcaggaaataagcctttgtttttttaagccatggcaacctggagattatttgctactgcagcctaaccccgctgtcctgactgttacaggtcaggtggctacagcagaatagcccttatcctaaacgcttggactagaagtattctggattgcatatatttttggattttggaatatttgcatgtacatttggtatatctgcacatataatcacatatatcctggagatgggacccaagtctaaatatgaaattcacgtatgctttatacacatagcctgaaggtaattttatacaacatttaaagaattttgtgcatgaaacagttttcattgtgttttgactgggacttaccccatgaggtcaggcttggaattttatacctgtggcatcatgttgatgctcaaaaagtttggggttttagagcattttggattttggatttttagatgagctcaacctggattggacctcaaagggtgcccttatacaaggtcaacatgcctagcaaggaagagagttgttttttgtttttttttgaaacagagtctcgctctgtcgcccaggctggagtgcaatggtgtgagcttggctcactgaaatagcggccttccagcttcaagcgattctcctgcctcagcctcctgagtagctgggattacaggcgcatgccaccatgcccagctaatttttgtatttttagtagagacggggtttcaccatgttggccaggctggtctcgaactcctgacctcaggtgatccacccgcttcagcctcccaccatgcctggctgagagttcttaaaactgaagatctcccaggtaagcccatctttgtgtggcaggatccacaggttaggctgggagggtccgggagcagaacgtggaagccaaattctgacgggcgcagcaggggtggaggctgatggcaccaaagtcgggggcggagagggcagtaaacacatgtgcccccctctgtcctacccaggcctcggtttccctgctcgcaaagtaagcatagtcactactaagcagtgccttaatatatcaagagctcttttccccggggcctccttcagtccttatagtagctctgaaatgtcctgcaacagctccctattttgcagaggaggagcctaaggcggcccacccatgggaggcagagctggcctcgacgccagccccatgctcactccacacccagcatcatgatgctgctgtcatcccccaacttccggcttcccgagctccaggcagtggagacccaccatacagcaggctgttagcaccgcctctgggtggtgaggggctgccgaagtttcggcccacctgccctccccaggacaggctcaaactgagtgtctaggaagagtctcttgactaggggagtgaacaggtcccagaggatcacagtactgctgtgggctctggctgggtaaatcatcccagctctggggctctgggctgcagcgcggcaaggcagtgtgttctgcacaaagacaggatgtacttggggagaggctgtaccattgttgtgagcggaagagaaattaattttaagcctggagttgattccagcctgggagggaaacgccaacacttggagagggatggtttcaggcatgtgcgcgccacagctcacgtgctcactgcagcctgaattcagtggggaaacgcgccccgggcaccctccctcctctgtcagtgttccaagccacccccacatcccagcaccggaagagcctggcccctccttccatctagagagccttgggtgtgttctccgctgagccacaccctgtcccctgccccaccaactaaaacacaccacccaggctgctgccgaaaaggctgggagaggggcagcgagccagactgaaaccgcctctttcgaactctctgaagggtttggtcagttctctgtcatttaacctagtgcttggtgatgaggacacagaatagagtgtggctctgctgctggcctcccgggtctccaggcctgatggagtgggacacacggacgtccagcaggttccggcctggcgggagagggaggtctggatcacaggctgcgggccaccgtgaccctgggggccgcatgtggtgggaagggcagcgggatgagctggcaaacactggggactccagctcccctaagggcctccgaactgctgccacagccgctactgctaggtgcactctgacatcagctccaagccggggagagggggtgctgccgtcaggaaggtgccacctgggccagaggcacgggacaccagggagcacctgctgcagagctggatgatcctggtgccctctaatgccctgactccaataagcctatctctgggcctcagtttccccaagtgtgcaatgaagggcctggccatccagacccccagcagatccggccccctgacatccattctagtccccttcctcactatgaggaccctaatattgtcttggcagttaacagacccagctacaaaaccccttttctcagtttcccctggctgctaggagtgaccaggagaccccagggtgcttatcaatgagacaggagaggacatcgtctgtgggcttccagagaggggcagacagcatgcacactgcttttgctcctggccctggtccgggagatgcactaccgtgggctttggcccccactcagcttgccctatgctagaaggttccctgatggcagtggggtgaggtgggctgcagagcccacgcttagagcaagagaaaggtcagccatcctgctgggctggcactgaccttgcaggtgccctgaggccagacggcaggcagcagcgatgccccaggtcccaggccccagaaggctggtcagcccccaggacaggaaccaggccacggctgaggactgtgagggtggcagacagaaggacaatcagacccaggctgcccaggcagaggcggggccaggaagagatctgcggacaaagtggcatctctaggcctctggaaattgtgtgtgatttcaagcaaagagacggtagtggttgaattttgtccccctaaaatccacgtctatgtagaacctcagagtgtgaccttctttggaagtaaggttgctggagatgcaatcacttgggatgaggtcatcctggaataagtgggccctaagtccactggttggtgcccttataaggagggaaaatacagacacacagagacatggccacgtgcagatggaagcagagactgggggatgtggccacaagccaaagaacacctggactccccagaagctgaaagagacaaggaagggtcctcccctagagcactggagggagagggccctgccgacaccttgacattggtctctgcctccagaactgtgaggggagacacttctgttgttcaagccccagctggtggctttgaaccctttgtgagagcagccccaggacaccagcacaaagggtgagcatgtaggaggccagtgtggtgacctgcgcatcctgtggtccctccctccggcgcccaacgcatcctcaggactagccggggcctggggaccggacagggagcaactggcagcagagggtgatgacagagcctgcattccggaatctgacccacaaagggctgtggcattcataggagaagccacggaagaccggcaggaatgacagaagcagcagcgagagcccttcagaggaccgcgaaacgcgaactcccaccccagcaaaccaccaaggggaagaggcgggcccccatccaggaggccttaggaacaggagagctgacttttctaaagcaaataaggtccaggttgcctaaaacaggggagggtagcctaaggctctcccagactcatgacaacttagaattgtacaagtggcacatttagctagaatctgggaggagcctgctgggggccgtgccattctgagggttcccggagttacacacacacacacacacacacacacacacacacccacacaacctccctcccacctgccttctccaaataaaaccatgtccctggtccttttctcttggtatccaccttctccatcatggaggaggtctcagctcctaatccactcggcaaagtcccagcggacagtgagtcactgagtgctgggccaggcacaagctgagctcagggcctccaaggcaaggtgacccagagggcgctgggaataggacagcgtaggtgcccccgcagtgggggatgtggctgggtgtctgtgaggatgcttcctgcatgacaagctggggttataagaacacaaaagcctgtaggatgaagcctggcccaaagcagtcggggtcccctgacctccccggcctctctccaggcagtgttctccccagggcgccaggcttccccagctccaagtctgggcgtctgaaatctgctgtgtaattggatcacgcccggcccgtgctgagcgcccatctgcgcccgtcttggaaaacacaagtctcagagaaggaaagcagttgccacaggtaattttctatcaaatatattacatttcttggaatcacacgcagaaattaactaattagattcccccttatttttgaaatgctttcagaggacaatggaaaggttcactctgttctgggaaacgcttcatttagacgctaaacattagaatgcgatttgtccttcaatcagggaagagtggactgagcggacatttttgtttttgtttttgagacagtctcgctctgtcacccaggctggagtgcagtggcgcgatctcggctcactgcaagctctgcctcccgggttcatgccattctcctgcctcagcctcccgagtagctgggactacaggtgcccaccatcacgcccggctaattttttttttgtatttttagtagagacggggttttaccgtgttagccaggatggtctcgatctcctgacctcgtgatccgcccgcctcagcctcccaactggcggacttttaaggatgctatccacgctccctgctcctggttccatcacgggccccgaacagctgcaggtgtgtgaaggcagtctgggaaacacttctgagtcagacccacctctctggttcaaccagaggctcctttctctccttgataacaatccaaattgtgattgttttatagaaccgccttttacaacagaatcatctccccacataccattttccctgatgctgcctgacaatccttgtctcccagggatgtgggcacacagccacatgctgctctacctcccacccgccctgagcactcggtggatgctgggactctgccggccagccaaccagaaaagggcgcatgagggtacatccgggctgcagaagaacatactaattggtttattttttgaaacaaggtcatgttgatctggaaggtaactcgggggaagagtagacaggaccagagggaggacagaggacaaggacatcattcagcaagatgagggcttgggaagctgggtctctgagaagcctgggcccctttaatcccagtgagccccttgcatggagcgttgatggatacggggcagggggacaaggacaggcgcaggtgctcattgaggagagaggtcctgggatccccagacctgggcatgagggggctgccactgggcacagatgggcaacctgggcaccatgcagaatagtgtctgcagctgatttagacacgttgaatatataaatacgttatatatattatgtatgttatatataacatatttatacatatattcatatacgtaacataaatgttatatttttatatatgtattacataaaaatatattgtatataatatatattctatataaaacatgtataagtatatttatatatatataaataacactgagttgaatatacaaaaatcctgagttcataatgacatactggtgaggaagagagagacagaccagggcagagaagacacagggagagtgaaaaagaccctacttcatccctcaacaacatgatagaaaaccaactcactggacatcagtagagatcactgaagcatcagcttcctatagagagacttgacaatgaaaaagaaagaattaagcatttatcttgccttcttgtacaaacagtgttcagcttaaccaagtcatcttatttgatatgtgaaagttcttcgagatggaagaatctcagctcatcactgcgaaggcatgccaggattaggaagtcatcagatgcaagcctgcaagcctcagtgtactcctcaatgtctgcagggcccaccccagagagaggcccctgggtgaccagccggtgaggagcttcaagaggaaggattcaccatcaccacctggatcctgtgtgcagcttttgtcacagcggtggcgagcacagtttctgcctcctggggagatggggtgtgaagctcacagcacctgcgtgtggctgggcccaacattaacagcgctgcaagagctcacctccatttataggaagtgggaaggacccaaggactggccgatgacaccacaggaggcagaaggcacatcgggggttgggggtagcctatggccaacctaccctgtccctctaacaacctaccctgtccctataacacgttgctggcaggaaacacgggagatggctcagactggagacctggggacatatctaccaagtgccacgtgggtcctgggtcaaagtcaccaccgtgaaaagacatttctgagataatttgggacatgtgctaatggaggggtttcagattccacccagagaccactgctgggtgcgtggatgggacagtgacactggggcccgcaagaaagatcccatgctgtgagagacagactgaaggggaagagggagtgacgcgatgcctgggatttgctgaagaaaaaaaaaagaataaaaaggtccgtctgtatatggatggcaagaatttcttggtaacaaaagcacagccaataaaagaaaaaataaatactaaggtcgatgaaaatttaaaacttttgtgcatcaaagggcaccatcaacagagcaaaaaggcagctaaagaatgggaggaaatatttgcaaatcatgtatctggtaaggggttagtatccagaatgtgcagaaaactcttacaactcaacaacagaaacaaaaatctaatttaaaaatgggcaaactggccaggtgaggtggctcatgcctgtaatcccagcactttgggaggccgaggtgggcggatcacttgaggtcaggagttcgagaccagactggccaacatggcaaaaccccatctccactaaaatttcaaaaattagccaggtgtgatggcacgtccctgtaaccccagttactcgggaggctgaggcagaagaattgctggaacccaggaggcaaaggtcgcagtgaggtgagatcacgccactgcactctagcctgggtgacagagtgagactccgtctcataaataaataaataaaaatgggtaaaggacttgaatagacatttctccaaagaagagatacaaatggctgataaggacttttctgaaaagatgttcaacaccactaatcaattagagaaaggcaaatccaaactacaacgggacaccatctcacacctgttaggatggccacgatcctaaaacagaaagtaatgacgctggtgagtatgtggggaaactggagcccttgggcaccgctggcaggaaggtaaagtggtgcagcccctgtggaacatggcatggctgctcctcaaaaccttaaacacagaacgagcacgtgagccagcaatgccacttctgcatctatgcccgaaggcattgacagcggggtcttgaagagatatctgcacacccgcgttcacggtggcagcactattcatggtagctaagaggtggacgcaacctaagtgtccacctacagatgaacagacacacaaaaggtggtgtttccgtagagttgggatagttatcattcaggcttaaaccagaaggagattctgatgcatgctacaacacggaggaacctcgaaggtattacactgagtgaaatgtaccaagcacaaaaagataaatactgcaggattccactgacctgaggtccctagagtggtcaaattcatagggagagaaagtgggatggtgggtgccaggggccgggggaggggatggggatgagtgttaatagggaagagtttcagtttgggaagatgagaaggttctggagatggatggtggtgatggtgaatggaaatgtacttaatgccactgaaatgtatacttaaaaatggttaagatggtaaattttacggtatgtgcactgtactacaattttaaacataatacaaagtataactgtaaaaaaaaaaaggggggaggaagtgaatggagcaaatggcggctgtgatctcttgggggccagctctccacaaggtcttcataaaccctcggtcacgctcatctgctgctcaagggcctccaatggctccccattgccctaggccttgacacagcctgaaaggccccgtagggcatgaggcccgcccctttctctgccacatccacccctcccgaatgttccagaatacgcagagtctttccctggtccaggtggggccttgcactcaccaccccggtgcccggcccaccctcacctcagctctaccctcctcttcaggtctcagcctaaatccttccccttggggagccttccctgaccactctgtcgacaaaggcgtggtctctgccctgtagctgcacagcatcctagtgtgtgtgagagtatatgcgtgagcatgtgtgaatgcatgtcagcacgtgtgtgtgtgtgaatgtgagtctgagtgtatgagcatgcgtgtatgcgagcatgcatgtgtgtgtacatgtatgagtatgtgtgtgagcagatgtgtgagcgtgtgaatgttagcatgtgtgaatgcgtgttagtacatgtgcatatgtgtgtatgaatgtgagtctgtgtgtatgagtgtgtatgcgagcatgtgtgagcatgtgtgcaagtgtgtgagcatatgaatatgtgtgagcacgtgtgagcatctgtgtatgtgtaagcacgtgtgtgaacatatgtacgaggatgcatgagaatgtgtgaatatgtgtgagcatgtgtgaatgcgtgttagtacatgtgcatgtgtgtgtatgaatgtgagtctgtgtgagtgtatgagtgtgtgtatgcgagcatgtgtgagcatgtgtgcaaatgtgtgagcatatgaatatatgtgtgagcacgtgtgagcatctgtgtatgtgtaagcacgtgtgtgaacatatgtgcgaggatgcatgatgtgtgaatatgtgtgagcatgtgtgtgagcatgtgtgtgagcatctgtgtgagcatgtgtgagcgtgtgtgtgaacatgtgtgtgggcatgtgtgagaacttgtgtatttataagaatgtatgtaagcatgtgtgaacatgtgtgtgcacatggtagcatgtgtgcaagtgtgtgtgaacatgtgtaccgtttcctggggttgtcacgacaaatcaccgcaaaccaaggggcttcaaacaacaggaatttttctctcagtctggcggcgggaagtctaagatcaaggggtaagcagggccacactcctctggtgggcacgtatgtgggtgcattcatgtgtgtgcacgtgtgtgtgcatgtgtatgggtacctgtgtgtatgtgcacgtgtgtgggtgcctgtgtgtgcatgtgtgtgtgcattagtatgtgtgtgtttccattcacagcacagccacagcctccagttatggagcctgttgacccacatagtgcctgtcaatctgtgcagtgcctgtttccccagcactcaggctctgtgagggcagggcctgctcttcctctctgcaggatcccaaaaaggcccaggctggtgctgagtacggactcagtgtgtggcccgcacacaactgattagacccagggtgcctatagagaccctcctgctattcacagatgggggcaggtggggctgggctgggtgtttactcccctcctggccgggccacggccagctctcctcctgcggtgcagaatccaggtgcccacagagacaaatgagcggccggagagccagcccatgataggcagctcctcagacctccccccaccaacccatcgggaagcagccactgcagagagggtgtgacccgtgggaggccgctgcccagcgctcaggaaggccggggcacaaaggatgctaggcactgggagtgaggctggcgccctggcgaggggagactggctgctccagaccctcgaaagccctggggcccagatcctggcagtcttgcaaaacagacctaggtgtcagacccctttccttcccgcaccccacactctaggctgcccaggggaatcccaaggagccttggtatcccagccagcctcaggctgaccagtgagtctacccagtgacggggctggagccctgtttggggtctgcgagctgcccacagctcacgccaagccggcttccgctctgtccatcaattcaggcccactgagcacaggttctcggggaatgctcaagagccccatgccaggtgggtcccattcacagatgtctgctcaccaaccagcaggaagctggaaagtacccccaggacagctagcagcccacagtgagctgtgaggcacacagcaatttggggctaattttctcctgcaaagaagttgatcccataatctggcaaatacactaatcgtcactgcactgctcagagcaggagcttagagctacagagtccggggggaacaggctcggcatagaatgagaccacggactgccggcttgaagaatgtgctgccaggatatgaaacccaaagctggcaatggaccacaagctactcccagtgacagaggacccaggccacagaccagctgctgtgctgggcacaatgcttctattgtcacggaaccctgcatccacgcccggccccgcttgcagatgggaaagctgagggtctggggctgcaggatgtgctcggcgccctgctgatgaccttccctgggccagcctgacccccggctcctctgatcctctctgctttaacggaagcaaagaatgagttgtaacagccgaggaccaaggagcagctcttctgtcaacagatgcaccggaaaatccgcggtggccgaggaagccctattttctttagtctgctcagcatttcttgtacaataataaaaacatctgaatttccaacaaatataatagaaagatttcctagaaaatgatctattctggctttggtcaaaaaagttgagagtccagccgggcacggtggctcacacctgtaatcccagcactttagaaggccgaggcgggtggatcaggagttcgagaccaacctggccaacatggtgaaaccccgtctctactaaaaatacaaaaattagctgggcatggttgcaggtacctgtaatcccagctacttgggaggctgaggcaggagaagcatttgaacacgggaggtggaggttgcagtgagccgagaccatgccactgcactccagcctgggcaacaagagtgagactccatctcaaaaaaacaaaaaaacaaaaaaaaaacaaaaaaaacattgagagtccatggctcacactgccctgagtctcacagagccagcctgggctggtgctgggaagggcttcccctgctggctgagggtctctgcagccaggacttgccactccctgatggcatctagaggcctctgtgttggggacccagatggcagcctcaggaaatggccagtttggggtggaagtgggctccgcaagtgcctgaaagggagtctcagtccatcaggcctttgctcagggtgccgtagcaaaatgccacaaactggtggcttctagacaacagaaatgtatttctcaccatgctgtgggctggaagagtcagtgtctggtgagggcccctgtcctggtttcttctcttggtgtcttcaaagggcagaaggggcaaaggggctctctggggttccttttataagggcactactcctcctcatgagggacccaccttcatgacctcatcccctcctgaaggccccaccttctaaaacaccatcacactgtggatgaggatttactgtatgaatttttcaggtgacacagaccatcacaccacagcaaagagggcctggtttttctttttcttttctttttgagagtcaatttccatctgattttcccagcaacacattaattgggtaaagccaaatccacatgagtaggtggggtgggtgcaggaaggagggtggcctgaggctcccctggctggccagggacatgaaggtgccctgcaggcccacagggtgggttctggcctccagggcctgagcggaccccccttgagccccaaggggtctttacctggctcctctctaaactctcggcctctcagtggtggagttctacgtggctgggattgggacatcagtggacccagggacggccccaaggaaggggctaggtctcagacataaggaggagggggcaggtcttcaggcccacaggcccgtctggggctcagagggctttgcccaggccgtccaggggcctggaggctgcagaacgtgcaggtgcagctgggatgtgtcgccaatggtaagcaggcaacctggggccacgcacagctagtgcagtgggctgagtggtgtctcccagaaagatgtgcccaggtcctaatctccggaactgagaatgggatcttatttggaaagagtcctcacagacataattaagttaaggaccttgagatgagaagattatcctggattacctggctgggccctaaacccagtgacaagtgtctttataagagagaggcagggggagatttgagacacagaatcgcagagaggagaaggccacgtgaagatggaggcagagacgagcgacgcagccatgagccaagggacgcctggagacacgggaagccggaagaggctgggaaggatcctcccctagagccaccatggggagcagggccctgccaggccctggatttcaaacctgtggcctccagcactgtgagtgaacgcatcgctgttgtctcaggccactcagtttctggtcatttgtgacagcggcctcaggacatgaatacagctatgcttcagagaggactgcacgaagctgaggcccgagccctgacctgggatcacaggcatgtgctggagctgggggcccactacgagcaggggagggctggggtaggaggggcgcatgcccagtcaggatccctccctgtctcccattctctagaacagtccctcaaggctgggctctggaatcctctgtaagttgctccatctcagaaagcctcagtttactcatctgtaaaacggagagtcaggcaagtccaccttgcagagctcctaggaagaatcgaggcgactgctgggtaacctgcttagcaccatgagtgcaggcaatgagcgtctacacagagagcctggggacttagagggatgcaaagagcctcttcgcttgaggcctgaaggttcagacagctaaaacatgggctggctactgcctggcatccctccctgatgaaaaataacaatagatcgtgtacagaatttttaaaattctaagtattttttttttctttactatgcttttttttctttttttcttttctttttttttttgagacgaagtcttgctgtgttgcccaggctggagtgcagtggcatgatcttggctcaccgcaagctccacctcctgggttcacaccgttctcctgcctcagcctcctgagtagctgggactacaggcgcatgccaccacgcctggataatttttttgtattagtagagatggggtttcaccgtggtagccaggatggtctcgatctcctgaccttgtgatctgcccgccttggcctcccaaagtgctgggattacaggcataagccactgcgcctggactatgcttttttcttaaacgtgctttagcttgtctaggaggatccagtacaaggcattgtgagatcaacagcagagaatggcatgtgctctccttccagaggcacagcaagaccgcctgccccagcctcccctgcagggaggaatgaccgccagttgagattgcagtcaacggaacagaagcggaagtgatatgcactttctcttctgccagccagaggcggccgagcccggtgacctgggcatctgcgtattcaggatggaggagctgggagctgggaggagcctgaagctgcttggaggagagctgcctgcccgacttgagaggggcaataaatatctttccacggctcaaatgaacagccagttttcagtatgtggcttgttacggtgtccagcattgcgggcacggacacacaatgtctaaaatgggtgcagttctacaaagcacacccgagatccctgggctgtgggcagtccagcgggcaggcaagcccctgccccagcttgcagctgtgctagcacaaaagggccaatctctctgggcaagggttgcactaggcaatcccactggggatgactcttctgggtgaccaaggttcaggctctttcctgggagttcctgggtctggagagaaggctacgggggactgggtaccaggatgggtaaggtcagaaggacaggggctggggtcactggcattcccctgagggaggccgcatttcacaggcttttccagttggtgaagcctttgcccgcagggtctctttaaaaggaaaccagacaaagccaacccaatacttgctgcgctgcgccctgacctcaaaccatcctgcctagctactggcaattaggctgcctttgagataaattttctcgcctaaaaatgcccatgggtcttaaaactttgattttccgttcgattcaaatttaaatccagaatcgcagtgctgtggggggtgggggggaaatgcccaggataaagacaatgtcctagctaacaaaccaaccagtgagtgacagaggggcctcagcaggaagtctgggcagaacggagcttgctaggtcaccccatgtgaactgctttggagaacagagtggtagctttgttagatttatggggacggcggctcagcctgtctaatcgcagttgaggcggggccgagaggtgtctcccctgtgtccacgctagctgggtgcttccctcccacggacacagaggccgggctgccacttccatccttcccctgacacctcccgtcatcttctgggaaacaccaagtgacacaaacaggacactgatttcctggaaatttatatctggctcaggagttgcacctgctgaagaggtgaagatgacaaaggccctccatgcgactgagaataacgcagagatggtccctcaggcttgagagccataatttcaccagctcgtttatttctaattagataaagaatacaagtttttaaaaaaagttactttacagaagagccaaggtgactacagttaataataatttattgcatatttcaaaatatacaagagaagatttggagtgttcccagcacaaagaaatacatgttggaggtgacgacatcgcagttatcctgatttgatccttagacatcgtgtgcatgtatcaaaacgtcacatgggcccgtacatatgtacaattactaggtatcagttaacaaatagctgagccccctgtgactcaccctccacccatctcttcctccaacgggttaccttggaggaaggcttatcttgaaggattatcacattggtgtggagctttccagaacttttgcataacatttatgttcccttggaaaatgtggagtacagagaatacatataatatttttgcatgcttttttaaaaagcagaggccgggtgcggtggctcacacctgtaatcccagcactttgggaggccgaggcgggcggatcacgaggtcaggagatcaagaccatcctggctaacacagtgaaaacccgtctctactaaaaatacaaaaaaattagccgggcgtggtggcaggtgcctgtagtcccagctcctcaggaggctgaggcaggagaatggcgtgaacccaggaggcggagcttgcagtgagctgagatcacgcgccactgcactccagcctgggcgacagagtgagactccgtctcggaaaaaaaaaaaaaaaaaaaagcagaaatattattatactacagtggttggtctgtgacctgtggttagtatttgggatggtgtcttgggaatcacgtcgtggttggtatgcaaatattcctctttcttttatacgttggcattgtttttggtcatttgaatgagggttgagctcctgccatgtgctgggtgctttctcttgtaggtgagcaagaaagacagtctttgctctcatagagttatggtcccatgggggaagactgaccaacaacaaaaggtgaacagaaaccataccgtgtgctggccagagctatgaataaacaggaagccgactaagggactgcaggtggaggggggggaggaacacagaggggcagaggagatctggggtcgggggctgagctggagctctgcccagggtctcagctgacccaagggtttgtacgtggcggcgagcaggggttatcactggtcctgtttcagagctaaggaaacatgctgggacttgccccagatttaacaggaaagcccaactattcaaaagttaaacaacaaaaagtgaagaacattgcttttttaaaaattccaaatttaaaaaaatgtagtagaagacacaaagcataaaatttgccattttacagtggccagttcatggcattaactacatttacagtgtgtgcagccatcaccagcgtgcatctccagaactttctcatcctcccaaactgaaactctgtccccattacacacgaactccccatccccttccccagcccccgacacccaccatcctactttctgtctctatgaatgtgacggatgtgactactctaggaacctcacttgagcggaatcatacagttcaaaggaagagaatgttgtatttggccactcctggcatctgtccatctgcttcccgatgggtcccaggctggatacctccatgtggggtggacgcagcgacaggaactgagggggcccccggccaagggcaggaccagcagccctcccgcatggcagctcccgcctgctgcaaatgcaagagggaggttgatcttggaagaacacacctttccaacatgcattcccagagacaatgcagatctcagcaaagtcaggggtgaggacagtgctgaaatccatctccagacctgcttgctaaaccccacagtgtcactgagtcccactttgctgtgctcatttcattgattccttcctttatgcattcagcaaacaacagcccatgccttttgccaagaccgacacctgtgcctcagacaaacacgtggagaagaaggtgactgcctttaagatgaccccagcctggcagggactatgaacaagcaggaaattcatcaaaagatctcgtcaaaggctgggcatggtggctcatggctgtaatgccagcactttgggaggctgaagcgggcagatcacctgagttcaggagttcgagacgagcctggccaacatggtgaaacccagtctttactaaaactacaaaaattagctgggcacctataatcccagctatcttaggaggctgaggcaggagaatcgcttgaacctgggaggcggagattgcagtgggccgagatcacgccactgcactccagcctgagcaacagtgagattctgtctcaaaacaaaaacaaaaacaaaaataaaaaacacatcaagaatgctttgaagaagcacacaaggtacacacaagcttcatcctgctcaatgccagaatcccggtgttgctggtcggaggcaggggctgtctaggggggctataggctggggatagggctggacatggggctgctgggcacacagcctgttctccaggaacaacaacaacaacaaaaacaaaaaacaaaaaactgaacaacaaatcagtccactgtaatcagaaggctcatcgaaaaacactctggaaaaattaactgacaacaaaaaatgtcttcccggaaaagatgaggctgggcccaatacaggaattaaaaccaatcactgctgaccccacacgggtgctgccgaggttcagctgctatatttacaacaagagaatgatgcatatgtcacgaattggaggcaacgccacctgccacaggccctcagggctgagtcccctcaaattcagtggccgacacctcacagtttcgcttcagtccagcagcagactggggagctggggcaaggcagagtgccctgggctttgagtccagcatcggggtggccaggacccccgagaaccctctgaccccctgccctgccacagcagggcatacagtgttcaagaactctggagccggagccagacttgggtttgaatcctgccctgtcactccctcatcatcacctgtgatgggtcatcctatgttcaccaaacctcagctgttccatgtgcaaactgacactaatgccatctccttcctcacactgctgagcgtggaaggggaccctggcatacagtaagtgctcaagaagtggcagaggtcattattgaaacagtccttgttattgttcccagagctgtgtggacccccagaactcgcatgctggtagcctgtggcggcaagggcagcgtttggatctcctgtgcttggtgccccctcaaacccaggacattcagtgtaaatgactgtgagcctcaggctggaaagatcgtttcccttcccagctagaaagactcatccatcaggctgtgtcagacgcacctgagccctccagggtggtcaaaggtaaggaagcttgtgtcccaagtgcagcatttagggcttcccaaggcaaagtgcccaatcaggctctctactctccaagttcgtggtgcatggtagccacagctcacctctcccaatacacaggatctccaagggccaccctgccatccctcaagttcctcagcccatgttttccctccttccttcagtttgacaataggggtggagcaaccactttgcaggatgtctctgcttaggggctatggagaagcatgggacctgaactctgcactctttgggaagaaggatcagataggattcaaatctgtttcaccaaccactaggctccaggcttgagcctaacaagcagttgctcaaaataacttggtagatgtgtgtaacccagatagataccctaaccccacgtggtccagtccttgttggaaagattttcaaggaatcacagtccagataccaaacagatagaaaacagggtttctgatctttaatagtacttctccagttattaaaaggaatctaacttttatttattttatttatttatttatttatttatttatttatttatttatttatttttgagacagagtattgctctgttgcccaggctggagtgcagtggcacaatctcggctcactgcaacctctgcttcctgggttcaagcggttctccctgcctcagcctcccgagtagctggtactacaggtgtccgccaccatgcccagcaaatttttgtattttttttagtagagataggggtttcaccacgttggccaggctggtcttgaactcttgacctcaggggatctgcctgccttggcctcccaaagtgctgggattacaggtatgagccaccgcgcccagccaaaagaaatctaacttaaagcacaaagcaatatcttttggtagccccaacttttatcatctgtatgtagaagtaagcccccagttttccttcaagtcttgcctgtgcataacttttgttccttccggctttctgcctaagctccctctgtttctttgttttcctctttcctctagaatctgcatcacagaagatatccagttgggcaagaccccgcctccctgacaggtggcacaggagggtggttggagcaggagggtgggaagtgatacgtggatcttggaagaacagcctggctctaccactcgccgtgtgtctgtgggtatgtgagtccccactctgtgctgtggcctcctcatgcagagaaaggagctgataaaagtcaccgagttaaacttaacacaaagtgagttcatgtgtgtgaactctctcaaaaacggtgctggcacacagtaggtgctcaagcagcgcaagcattttacacagtcactgccgtggctgttcggagtcttatttgcagtctgtatcatgctgctcagcagttaagcttttgttggatctgagctctgtcttaacaaaaggggacaggacccccttccctctgcggtccttctgcccaggcatgtgacgaaggtggtgaactcagcactcactgaacacccgcccatcccaccccggatggggactctggggtgtgcatcagcagtttcaagaaacacagaatgaccacctgacccagcaattccactcctaggtatgtaccctaaggaactgaaaacgaaaactggtacaaaaacgtttatgtcgacattattcacaaccataagttagaaacagcccaagtgtccctgaactagtgaatggataaactaattgtggtctaaccacatggtggaacgttattcacccacaaacagaaggtagtacggacacatgctaccatacggatgaacctaaagcacacgatgctgaaagaagccagacaaaaggttgcctagagcatgattctgtgggtggaaaatgcccggaacaggcagacccaagacccagaggggatgagtatttgcctggggctgggagggagatggagagtgagtgctaatgggtttgatggtaaattttatggtctgtgtattttaccacaataaaaaagacatacccaagtgaaaaaaaaagtgtataaacacatgacaaaatgtattactaacagacacatataaagaagtaaaattccacaaagataagccttgttatgcggacactgtctcctggtggcagcatccctggttttttctttggcttctctgcattaccaattttatttgtgtctgacatgatttactcgaaacacagtgaaataatgctaatgtaaaagctggctatcaggcagatatgggggtaaagtttactcaaaatttcctaggaccaggggtacaattccccctgtaaacccctcaggattccagtgggcctggggagagaaggctggcaccttccagggaagggctggcttctcacgctctctctgatgtaaatgaatccacccctccacctccatcagcttttcaagttcaggccctgatggagagggggaaggggtttgggaggaaggagacccttgtccaagacggaagttctatcctggctgtgctctcctcagtggtgccttcctttccttaaggaatatttattggtggcctgccatgtgctcggctctgggtggtcccttatctgatggggcatgtgcaggaagtgactatggcagagggttatgagcgggcatcacaggcaactttcagggagcagatgcaggaggtgccctggtaaagcaggtggaggaggcaaaactgtgggcaagtgtctggggacaggaggggtgtggcacattccggagaccagagagagtgtccaatggcgacgttcatctcctcactggcctggcacacgtgccatctccccttctcacccatataacccactcctccatctgcaaccccagccctgagggtgctgaaggaggtgcacatgcccaggaccgtccctgtctatctccatgaccccctaggtcctgccatggagactgaacacaaaggagatgcatgggaaagtctgctccatgggacccatctgaagatcctggggagagggaagtagagaacttgctggtgggtggttgatttcatgagaccacagcggggctaccattctcagggctccacagcatcagctctaactccccttctcatcccactctgcttactgttggcgcacacacaccctaattcccagggctgacaaactccatcaattaaaagatcctgtggggcacttagcacagggccttcctccagttcatttgccagtctaaccacttgtatcatgaaactccccacgaaagggcaccaaaggcgaagagaaatcagtactaacaagagcctgctgagaacactgggaggtgggcagtgggtgtatgggagggaggaggggggcaggtggagaggacccagaggcaccaatgggtgcatcagaggacctggcgccagcagcttccaacatggagatgtcagcccactatgcctcctgcagccttcgctccatgtagcctggggctgggtgtacagcatccacacacagaaaaagatggctgttaagattacatcccaatgatctgggacttacctggagcatcagacagacacagtgcaaaagaaacaagctttggagtcagcttagattcagacctccctggagggccctgggcaggcttcttaatctctctgaactgtgctgcatgctggagatgtagcagagacctggtcagcaaactctctgacccacagggaatgttccctgagggaggtggatagtaagtcagtcacctaacacgggagatgtatgattcctatggtcatggaagcacacggtgtgagtgtgagagtcagggcaacctgagggtgccaagaggggcctctctgagaaggcatcatgtgagctgaaacctcagtggtgaggggagtggggctcaaagcagatgcagatggacatggcaggacatagcagatgctcaaccatgttggctccttggcccctccttgtggaagagatttctccatcgagtagatgagactgtcactaagtaatgagcctctatgcccagaaactccaaggacacaggggacagaaatgaaaggtgcagggatggagggaggggacatgctgagggctttctccagactcctgaggaaggctgcatccaatcctcccagctgtctagttcagcaccctgcagagagccagtgccctggagtggttcagcaccctggagagagaccatgccacacaagggttcagcaccctggagagatccagcaatgctcttgctctgtgcagctgtacagccacacacatttgtacctacttcactaacaacccaggcccccactagaccagccggtcatgcccagcttcatagcatctgatcactccccaaatccaccttgaacattcctgaccccctaagcttttgctcaagaccttcctcctcagttctgcctgcaaaaacctcacttacccatcaaagcctggagccaacaccatctttcatgaagcccttttcctgatttactttggggccttcaccacactctgctttttgcctaccccttctagactgtgtgttcctcaaggaactgtgtctgattcacgtctttcttccagcccagtacctgggaggcagaatgtatgcttcagaaatgaatgagtgaagcttcagaagtaatttttacaattgccaccatttgttgagaactcatgatgccagaaactgctacatgcttcacacacacttttatttacagttcaagaaactgaggccaagaaatgagcaacctgcccaagttcacacagttaggaagaggcagagcctggattcaaacctggatcatatggcacagcctgtgcccttgaccgcggctcctctctgcctctctccaaccctgtgtgctgccatctgccagtcccatggcatctgagcacagcagccatggtcccctgaagtgattctgaatctttttatagcctgaaattgaaatcactgatgcttcaaattagaaccccaaaatgaacgagccaagacttcagatttgcagttgccgagctgcccgcatccaccttctcagcaagattcctgggccactcctcagcccgaaccacctgttcccagtcaatatggaggacaaagagaacgacctccccaggcccagaaggccacatgcagaaaagggatccaacctccccgccatccagggctccccacagagcagtggcctctgtctgggagaagaaagaccacagtgcattaagcctcagagagcagaccccaatgctgttggcctcagagactgaagatccccagtgctattagccttagagagtaaaggcccccaatgctattacccttggtcaatggatcctgacgacacggtgagaagccactgagctgccaggacagaaacaccccacactcaagagggatgcaggacagaccctgtttgtctttggtgtgaatgcaatgaaatattggccttgatgaccaaagcaccaatgtgaccctggctgaagaattcagcagtcaccctgggttcctgctaacatcagctggtgtttggtctttaacttggttattaagtagccattcaaaaccatctaaataagagtggaagaaattttggggatggggtggagagttcctagattggtcatcaggtccaccagcaggacatgtgacaaagtctctcacaataccccaaaaggaaagctagagaaatgtgagctgtgtgatgtggctgaaccactaaacccaagggatgctggcaccaggcaaaccacaacagggctctggccttggccctgggatttgctgctagagggcaaagtgggcatcaggaataggaattccaaggtgatctaaaagccagacccatgccaacagagaattgtacaggctggtaagtgctctgggagcagtggtttgagccaaaggaggagatatgcctgccagggactttggaggctggcgggtggggtgggacaggtacctctattagtgatgttcctcacaacagaggcacaaggaaaccatggctcatgtactcttggctggaagtgtccgacgtacttggcacatggtgggtgtgccctgtgactgctacatgcttcaaataatagtggtaacaaacatcagtcattattataatattattatccccgtttgttcaactaatagccactggtttcctcttctgagtcaggcatcattaatgatgatgaaagacaagatgataatcaatgacaaatactgactgaggccgggtggggtgcatgcatctttagtcccagtacttcaggaggctgaggtgggaggatcatttgaggccaggagtttgagaccagcccaggcaacaaagcaagactctggctctataaaaaagtacaaaagttagctacgtatggtggtgcgtgcctgtagtctgaactacttggaaggctgaggtgggaggatcttttgaacccaggagctcaaggctgcagtgagctgtgattgtgccatgcactccagcctgggcaacagagcaagatcctgtctctaaaaaagaaagttgattgaatgccagccctgtgctcagcgcctctgaccagcagtccagtgctaagagcccagttcagcacaaccacccattttatcaacacgaatactgggacccagcaagcataatgactgatcatgctgcatctggacttcattttctttcccttttctctttttttgagatggagtctcgctctgtcacccaggctggagtgcagtggagcaatctcggctcactgcaagctccgcctcccaggttcacaccattctcctgccccagcctcccgagtagctgggactacaggcgcccaccaccacacccggctaatttttttgtatttttagtagagacggggtttcaccatgttagccaggatggtctcgatttcctgacctcgtgatccgcctgccttggcctcccaaagtgctgggattacaggcgtgagccactgcacccggcctggacttcattttctttcctccaagtaatatttaactctgaagctgtggggattgacccttgagcagcgagctctaacaactgttcttcacaccagcttggttgcaaagtcaaacatgctagaggccacctcacatttctcaagtcccattttaaaataccagcccaagaaacatatatatttttttcaagacagagtcttgctctgttgcccaggctggagtgcagtggtgcgatctcggctcactgcaacctcccgctcccgggttcaagtgattctcctgcctcagccttccaaaaaaaaaaaaaaaaaaaaaagaaagaaaatgaagtccatattcagcatgatcagtcattaggcttgctgggtcccagtattcctgttgataaattgggtggttgtgacagtagcagaatcacctgagatgaactgggctctcagcactggactgctagtcagaggcgctgagcacagagctggcattcaatcaactgggattaacaggcacatgccaccatgcccagctaatttttgtatttttagtagagacagggtttcaccatgttggccatgctggtctcgaactcctgacctcaagtgatctgcctgccttggcctcccaaagtgctggaattacaggcataagccaccacacccggccttatgagatactcccagggtctccgaggaaaacaccagggcatccctcttagcatcctgacttaaatacaaaccacgagtataaagaagatccacgccctctctcgtgcaagtatttaatacgaggaaaatgtaattagcaaactcgagcaccacttttcaaggatgaaggatactgccacctgctttaactgcaagggaaaacctatttgcagaaattaacacaaaaatgagattggccacttcagggccaagaaaacaatcacaaaaaccataggcgtcatcagagccctgcagcaggcgggtaaggaatggccccgggaaattaattaatgcccaggaaggctttttcctctgacagcaaacagcactatctgtgccaagggggctgaacatttgtctcctctgtgagataactttcttctaagacacagtttcctatgtatgaaatggatacttttcaaaatatgaatacttcgattctaggaaatctgagacaaacatctgaaagaaagagaaaataacacaatctcaccacctaggggttaatatttcctttcctttttgttttctattctatgactatactggggaaagatggtattagatgatattgtgctgatcattttgattctgcctttctcactaagtagaatgtaaccttttctggttggtattaagagctccttgtaaacatcatttttaatgctttcttatgaattcacaacagatgtccattgccactgaaccattctcctattagccccgccccctccctgccccaactccttgtttttgccacactgtaattgctacctggttttgtttttgttttttttgtttttttttttttgagacggagttttgctctgtcacccaggctggagtgcagtggcgtgatctcggctcacggcaacgtccgcctcccgggttcaagcgattctcctgcctcagcctcctgagtagctgggatttcagacacgcaccaccacgcccagctaattttttgtatttttagtagagacggggtttcatcatattggccaggctggtctcgaactcctgacctcaggtgatccacccgtcttggcctcccaaagtgctgggattacaggcgtgatttctacctgttttttaaaaaattattcccttagcatggattcctagatgtaaaattcctggttcagctttatggctcttgttacatactaccacattgattgtgaaaacatttatggcaacttaggctttcccccagcaacacatgagtgctgtcaccagcaaggagtatagtcacaaaaaagtatttgctaatttgaaaataaaacagtcaccgcactgcttttctttttaccttttgcccatttatacataaagcacatcaaagtgttgttcaggcatctttgagccatgacattacagagtcagacaatgtgggttggaattccaccttctccactcaccagctacatggccatgtagttactgcacctatgtacctcagtttccccatctgtaaaatggggaggaacacacatgctatatggatgactgtgagggttaagcggagcactgcagggcttgtagggtttggagatccagctcagctgctataaacaaggacacagccttcttgggacatttgttgcaaatgttgtttgccctctgcctgcctgctgttgagttgaactgtaaggatgtctcagttacaggatattttagatcacaaaagtcattcaagaaacaacatttaggttgtcaaacaaggggtttgtggaagacagtcctagtcttaagactaggagattaacgcagcacctgcttgtgtttgggtcgaggagactttagttggcaggccacatcaagaggctggaatgtcaacttgcactgggccagtgggtcatcaccttgcctgcctgttgggacccccggcatcaccactgcagctttcatggatgcccagctctcgcctcatgattctgattcagggcgtgtgggctggagacgaggtttctataaccctcaggtgactgacgcccagccaggtttcactgagtgagacctacagtgagccctgcatgacatccaagtggcgtccccacctccacatctccttacacacttgatgcactaccgtcatccaggaaccacccacatcctccttagcacatgtcgtgaacttcagaagcaacctgtgatctctccagccccatgttgtgggagtgaaggggcctaataagggccatctcaaagagacagcagacaaagtcttcagcaaactcttatggcaggctcactctcctttgaaactctctggtctcagcttcctgacaagctctaatcattatgaaaaccagtttggactgggtttcctgttgtcaccagagggacatgggcctctgtcactcctggctggtggaggccccatcctcacctctgacctgcatagaaagaaacacctgccctgcttctctcgggggctgtcactgctccaagcctcggcttcagcctccctcagcaggtcccacgggcattctccgcaggggcattcaacttcccgccgccctgcccctcccacggcctctgaaatctctttggctccttctcccctgggctggctgacatttcacaatctgggacggcttagtgtcactgtctatcctgggaattccggcacactagctgatctgaaatggcaaatcgcaccatccatggggccactgtgatcaaatgtccctacccgtgggacattcacttatctttcacgtccacctctgaggtgaaccttttattaccacacagcttgagtgataacatctatctgtctcatgagactcccgatctggagatagctcaaagcctttgattgtggttggtagggtcagggggtggtcaaccaaggaacaaaaacaacagcaaaagaacaaactcttcccaaaagcttaggtaggagagaaataaattctacaagctaagtacccaagaaagtcatgcacagcaggaaatcatgacaggcaccaaggccgagagccggatggccacgtcggggcattctcacaaagttaacgagggaaaatgaagttctagagataccaaagacattaaaagccaacattcacttcaaagggtgcccattggtccaaaagttcaaaccgcagcatgcatttttaaagagaaaataaaaatctgtcacactttcgaggttctttcaaaatagcagagagaaaggaaggcttgccaagggctgcttggggtaaggaagacagaatgcctgcattttgggcagcttttcacgtggagaccttgcacctcaccgggagctcagaaaccccactgactccaggactggctgctcaccaaaaagaaaattcacgtgagacatgtgaggctatttcacaccatccctccaaggtcaaagctcttcactaaaaatagagaaacatggtctgttggaacaaacacgcacctattatgctatacaagattttaatattccggtggcaaaatccagtcgctaggaacacaactcaatggaattctcagtcttaagcccctagaggagaatttctgagtcccagaggcagctgtggacatgaactgggaggagccaggatcgtgcaagggtccagctgcctgcaccccgcaccctcattagtgtatgactggtgtggagcagcctcgtagggctgtggagggcccagtgctccttgggttatctgtgataatcataatgcaggcgcagccctaatgcatctcaggaccagccattcctagaatactggaagtcagaggttacccagaatataaaacctgccccaaaatggcaaatctatttgcataccagaggttaaaagcaatgtcagaggaggtgcttagaaacagaagtgtggaaactctcaaagctccaaatttccacaaaggcttcaaaccgacaggacaggtccaccttctcagccccacccaggtgagcgctgcagccacagacagctacatcttctaacccactgaggctccgctcactgggcaagtgcagggcccacacacgtgcctcagcaggccacgtttctcttattgatgaggttatccaggaaacagtccaatgagctgaacaacgggggttgttcttgcatctgcagccctcttttattattgaaaatcaagaaccaagagtgacctatttcaacaccccccccaccctgcctgtcacacgtgcacacactcttacaccacctatagacttcagccctgctgctaggcccaaggccacgcccccccaacacacacacacacacacacacacacacacacacacagacacacacacacacacagacacacacacacacacagacacacacacacacacacacacacagacacacacacacgaaggggactcacatcccaactgcatcctacagaggatgattcaacccaggccctctgcatttccatgaaggttacaaatcgagttagcccacaaagccacagcgggctccaatctctgtcattctggtggtgcacccgacagtttcaacacacaagaacccaaataagctcatttctcattcaaaccaggttctgattggtcaataataatttaaatgcatcttccagcaaatcaaagagatcaacatgaggcactcagaataagtttaagcacctgctccatcttacctggctctccaatagtctcttcccttctgactttccattgccccgtaatagtcctgaggatctctaaggagatcactagcagaatcatagcatgaacaagaagcttgggagcttaggcctgattgggagaaatgatcacgggtagccctctcaccacgggtggagatgtgggctcctcatttacagaatgaatgtctgtctgtccagcccaatggcagggaccaccaaatggctggctggatgccacgtacccaccccttccacctgcatgtggagttctgatgtacacgaggctgggctcagggtgacatggaagagcgcgtgcatccaagaaatgcgcactcccaacgaggaccattcgagtctactgaacctttaaaatatcatctttttcaacctgtaacattcttttcttcttcctacttccaaagagtcacatgttcctttgcataacaagattaaaactgaacacctaaactcacaaaaaggcgaggtgatcagatgtactggggcctccgaacccctcgcacacaccaacgtgccaaccgtagggactgtttgcagagccggagcactcaaacctctattctctaaaggaagagaatgctctttccttttcagtaccagcaaaagttcattttcaaagcatctgaattcctaagtttcctttttgcaccatcgacaccagccatccctcttgcccgggctccttggtcttggaaggccatcgtccatctgatggggtggttaccacaacctgcaaatctacaagctcttagccatcaatgttacagacctcacgccagcaactgccacacaagagtggttgccgactcacccataggacacaagaagggacgatgactcctcttggtgcctatttagtcacaactaaaccacccacaggtctgcacatgtccccaacatcatggtgaccacatgcctcctctttctaccttctacttcaagaccaatgaccaaattccacagacttttcctccttccaacgggttacggccaaggcctccaagacaagcccaacaccaggtccacaggcagtggcacccacggtgggagaaactgaccaatgaaagttcatggcagcctccacaagcacccccagactgggcctcgtggctgtgctgccaggactacgaccctctccccgagagtcggcgctctccccaagcagaaagatacagacacctgtgtccctacctcaatcaagaagtccccggtccttagtccggcttgccacgccaccccaccttcatccacggactccaggtactgtagggctgggaaagccggtgttggtgtgaattcttcaatgggtgtgtcagctgggaagacaagcagcacctggttacaagcctgggagatgtcttccaagttcacattgcctgacctccccacaggaccccgggaggaagtgggcccactcatctcccattgcaggtggctagtccaggccaactctcccccaggaagggcttgagattcatactcatgggctgatgcaactcaagcaatgaagtcaattgcaccttggggccgccatcatatttcttggcctctctgctgaaaccacaggataatgtgctctgtggtacatgtctacacgcctgtcattttctttaaaagcatcagtgactaaacattttcggttctaaaaatggaaaagttcctcccctgccacacagagctacagaaacaccacactaaaccacttgccaaatttacatctacgtagactcgcaaccaagggaattcaacttggaacgcggacggaacatcacgctgacccagtgggtggctacagatttggaatgtgctcatgagtcctctctacagggagtccaggcctctgtgaccactctgtgtgtgaccagtgtccctgggcactggcatgtgtgtgtgtgggtgctgaaccactactgcccagcacagtgaggcttggcttctggggccccacacagctgccaggtgcaactccagggcaggagatggacttttctagggaggcatgagtggccaagggtgggtgggtgtggagataaagattccagcagggggaggggagagcaaatcacacagacaggcgtggatgctctcacagagacagatgcatctgctctttctctctctggacagctcgctatggagctgcctgagtctgaggcaggtgggcatgccagctggggaggaggcctcctgcagcacaggtgcgggacccctggcacagcgcgtaagctccaagatgaaacttccacatggctgagccacacacacagtgggcggatgtcccctctcatggggaggtgatgccattttgttttcttttggaggggaagctgcgcgtgcagggtgactggcaggtgcaccgccatggactgcattcctgagcctcccacgacgggccacgtaacgtgtgtgctgccggctcagtccacggcagaggggaccatcttgtcacatttcctttgcaaagtcaccttagaggtgagcacacaaatgcctgccgcccttggagccaaagcccactcccagaatggggcagtttctaggtgcctgaaactcaggccagggcaatcctggggatttgagacccagagctctgagggtagccacagtctggctcaactagaacacaaaatactgaccaccccatcatttaaaaacaaaaggtaggaggggcaggagggagagagaacccattcagaacaacatcatctacagaaaattaaaaacattcctcaaggaagccctaacgttttctgagtaaggcacaatgtgaaggaacatggttgtctagcaactgagtgcccccaggaaaaatgcttatttaatgcttattcctgagctggggaacgtttttcatgcaggcgtatacacacacacacacacacacacacacacacacacacacacacacacacacacacaaacatgggaacatattcaggctcagagcggctgctcttacctttggcccctcgaagcacgaatccaaagccctcattgtcttttttctgcaggaccaccgtcttctcctcaataatgcagtcactgtagagagaattccggggacagcgaccattattgtagcccgtcatcatcaccgcggccgctcctccgccggggacgttcatcatcatagccaattaatcaccccagctcgccagatccaggcagcatggaggaaaggaggcagcgagggtgcaggaggagcgaaggaagaggggggtggctaccgggataggcgagcgtggcacaatgagacttgcagggtgggggcaggcagagccggagccagccggaggaaggagtcatacatggtggggcggctgcctgagggatggctgagctggaggctcaaggggggctggccaggacgccgcccagggcaaagaaagtaagtggcccgaacggcggcggcggcagcggcggcctcagcagcggcggcgtcgggaatgagctcctccggcttgtcccgaccacacgcatcttccagggaagcccgggaaaatcagccagaggagaaatgaggcagcagttttgttttgcttttccttgaagggggtttaaaataaaatcaaatcctatctgctccccgcacgagccggcagcaggcaccagagacgcagggacctgcgcgtcgcatccagcgccccctccctctcccgtcccggcgccggcggtgtgcggcaggcaggagcccccacaatcatctgacgagcccacagtgcgcccggcggctgcctgggcgtcatcccgcgcgagcatccgcaggctgggctgggagagggcggggagggggagcggctggggctctctctgcatccccccctccagcgtccccccggtcccttgcagccttggaaggtggccggtggccggtcggggaggggtgggggctccctggcagaggactcaggacatttcggtgttaaagcccctgaggacaccagccccctctggggatgatgaattcattgctggggaactggagggggtatgtggctgcccctttgagatgacaaagctaaagccacaactgcttgcctctagccatggcattttttttttttaaggaaagaaaccaaaaaagctccaactttgctctagtggccacagtgtcctctcgcttttcctgctggcactcgccacatgacatccagcccccgaggcacccagagtgtgtgggacggtgccctgctcagtgagcctccaggctgcggctgaactgtcctccacccccaccttctgggtggcctgcgggggcagaaggggagtgagatgaaggctaccggcacccccccgccccgtaggactctgctgctgcccggaagttagtggggagctgggaaggcctctgtggaggggagcggggaagggagggaggcagcgtggagggaggcctctacagggtcttgcggggctgtgtgtgagcctcgggggtgaggagaaaggacaccaggccagcggcccagccggaaaaagctgcagatgggtcatgaggaacccaccaggcccccgtcgcacaggggcagtcccagggatgcaaatttcaaacaaggccatgtgctgacggactcttggtcccagaggagtgcgggtcagctctgcctggcaccagcaccaggttcacggtctacaggaagcacagggccccaggtgcagccagctggtgacagcacagccaccccggattggggggccctggggaggaggagggacggggcaaacgtggatgacagggctcagtatcctggacaagggacgagcagcggcccctcgatcctcccattttacagatgaggctggtgaggctcagagagatcggaggacccagctagggaacgcgtgctcttctcaccactccacgcacccacccccgacagcatcagagggtcgtgcatggaggcatgctggggtgaccctgtcttccaggaatagcccagcatgaatgatagcttcacagccgaagaccaggacaatccaggtgactggtcactcccgttgtcagcagctgggaggggggttctggcccctgaccttccttaccttgccccctccccagagacagcctgctaagtgcagggaggtccactctggggaactcggtcacaactgtgagcccctcttggctcatccctggaagcccacttaccctgctcagggccaccaaacaagggctgacacagggtcagaggtccaggaccctgggagcctgggggtgaggtcacatggttattgtgacctttagaaaatgatggggctctctaaacctcagtttccctgcacagcaagagtgggtaagaacaaacctacaggcctcttgggatcaccatggggtcagatgaggccatgccatgctggtgtggtgtaataggatgcctcaggccgctgtccctgtgacggctgccattaacctccagcaggcctggtaggtggccaggactctgcagccctaaggaggctgagcagggagagctggggctctactgccatggatttaggggtccatgaggcattgatgagcagaccctctaccaggtccctcgacctgtctccacggccccccacaacgagaacacagacttgtgtccctcatgggaaatgccttctagtcaccacccattttccctctgaactcctgaaaggggagtcagcccaccccggccccatggctcactcacggctggggaggcgcaagctgtgtgaccagcctgtgtgtctcctgtgtctccttcatggaaggttctctaaaggccaaggctgccaaagccaagagcctctgctcaaccctgctgtgcacctgctgtctgcaagaggagctgctgagggtgaccgcctccctgaaaccctggaaggatgatgccgaaccctggggtctggagctcagggccctgcactctccctggggacacatgggctgatcaagtccatctccacccagctccaaggggaacctgtcatgcgctccaggcgtgctcacttgcactgctgggcagctcctcctgcagtgcccaacgccatccaaaccttgcatctccaagatgacccagaccacttcctgccagcataccctgcgacgggaacttcttagggccaggggggctgcccagacacttgctagctgtctcccatagactagagaagggcaggggcattccagtgtggctggtggaggcacaggctttggcatcacacggagcgtggttcaaatcccagctttgctttgaccccaaggtcactgacctatcaggccccagagcctgctctgcaaaatgagaacaacaagatgcacctgatgggtcctgagctggaggccgtggagtcgtgcatccatgcctcagaaccagcccaggcaagcagcacatgttcataactccaacagttacaagtgggatccctgtctgcacacgccaccctctcttccccggacccccttcctcctacagggacccctctgatctcgacatccagggctaaaaccttttcagtgattcctaatgcacccaagaacttagttttttaaaattagagacggggttttgctctgccactcaggctggagtgcagtggtgccatcacagctcactgtaagtttgaaccccaggcagtacgtgatcctcctacctcagcctcccaagtagctgggactacaggcacacaccaccatgcccagctaatttttaatttttttgtagagacagggtctcactgtgttgcccatgatggtcttaaactcctggcctcaagggatgctcccttctcagcctccaaggtgctgggattatagacgtgagccaccacaccctgctccatctgagaattttctagcccacacttgtaactgtgcaaagatcttgccccaagactgtaatggccctgtcctgtttattcagtaaaacaccaaactgcttagtctctgacattaagaaggactgtttctaacttctctttccggcattgtttcaggatctaaacagcccccactccccacccaccatgaacccatctcactttcactggcagacagacatgggtttgaatttcaacccagacattgaccaccttgactacttacagcctcaatttcctgacctgcaaagttggggagaaacctctggcttgtaagttttaggaggagcaagtgaggcgatgcccagtgaatgctccatgagcaggaggctccttgtaaccaggggaagctgctcttcttagcatccccgtccaccttcttgagctgggtgaccctggagaaaatgtcccctctgagcttgtctcttgtgggggaggggacattttctacaaggtcaatgggggcagtgacctcatcctgcagaccaccccaaatgcccacagcaccccgcataggccaggtgccccatgtgtgcccagaggggatgcaaaatgggtatgaactcaagtcaggagcagagcagggagaaacggatgttgggtgggaggtgggcgaaggatgactacagggtttcgagtaaaaaggcaccagaacaatccctggattcctagttaaacccagaaggtagactcagtgctgcagaggacctacggcatgcacctggcttggcccaggaagtcagagaggaaacagaaaaggcagccccaggcccttagaaactttcaatgttttggggaattcatgaaaagcaatgggacactctagaagagacattccttgaaaggagctgcagtcactgtgtctgaaaggcggaacttggcagcaccccccatccccatgcaatcagacaggggggtctcacacgcaggccttaggaaggggcctttctggagacaagaaaccctcagaggctccttctgctggttcatgaatctaaaacctatcccaggatgacagctgcggctgggtccggaagttgtggcattgagttctgtgtgctgccctagaactgtgctgaagtccctgtgaaccagagtctgccctgaccttggcccctgccagcctgccctgcccctgcaccagcagacccactctccacatgcagatgagatgcactgcaatccagtttcatggggaaatgaccgaggcgcctacacgttccccacgctgtgttgggacagccttctccaagcccgtctcaccccctaacctgctcactgatcacgtgcctgaagtaggcactgtgggctccttgtaagcaaatgccatgccctgatcctctgagtatctccatgcaacacaacattgacccgtgcttattgattgaacaaaaaatgtaatccagcggcgcactccccaaatgttttctgagctaggtggaagggcactttgacatgccccaaatgtaccctcttttgccaacatctgcttgcagcaggagctgtggaaggtgaagggggtgggcaaccagccccaccaagtacagctgtgcaggttgtgcactgtacaactatggaggaaaccattgccatcatggccatcacggcacaggtactaatggtaatttcgtcacagagggaagaaaaacgtcttaaggaaggggcaagcaccttttcctagttcaaacaaagatggggtctaggctgccctggccatgctgccatggagaatgcaagaggtatccctatgggagccatattggcttcccggagacacaactacctccatgttgatgccctcctgggagccacttggaggagagagcatcaaaggtttgcctgtttctgctcacccacggtcccactgtatgctgcaagagagcttatgggatacacttggagcacttagcaccttgaagcaagacaggagggttgtggagacccagggatggccacgcagcaggccccagaggtctctccccgctggcaggcctaaagatgctcctggtgtctgcctcgcaagaccacaggtggccacacaccctgtggcttttagcagtggcccgggttccctttctcccactgggcgccatgacagactcacagggaaggctgcactttccctggtccagcgggcagcaggtgccagtgatgacagttggcgtttaggatctgtcagtcactttaacaagctcccttggcagcagcacctgatcctcgaggtgatgtccatttggaggcacaggaagccaggcctgagctggcccagacgtatgggcctgaggggctctgggtggctctgtgtgcctccccacacatggggtggatagatgtggacattttaactctgaacaccagtgttattggggtagaccagatggctttactcatagctctcaggatcccagctgggttggtggccccgtctggtgacagctttagttcttccgtgaccagctgggactgggtttcaaagttcagaagtaactggggccagtgtcaagccgccgtgtaaatcaataaatcaatccagctgttacatcctgaatacccactgagagtcaggggatgaactgggtgctgggcatttaggaaggaacaaaccaggcccagtctggtccttatagagttgtctggtgtggtcagttgaatggtgactcaacccacccaaaaaaatgtgtccaattcctaacccccagcgtctgtgaaagtgacgacacttggaatttgggtctttgcaggtataattagttaagggtcttgagttgagatcttcctggatttagggagggtcctaaaccaatgactgtgcccttacgcgagaaaagcagagggaggttgacacccagaggcagtgcagaggaggccatgggaaggtggaggcagaggctggagtgatgtggaggctggagtgatgtggcccagctgaggagcaccaaggactgcaggccaacagcagaggtggaggaggaagactctcccctggagcccccggagggagcgtggccctgctgtcatcttggttttggacctctggcctccagggctgtgacaggtaagtgacttctcttgttttgagccccctagtctgtggtgatcgttagagcaaaggccgggcaagtgaggaagataaacatcaatccacagtcacagaaatgtgtgccttcaacagtgcaggacgtggttctgtgagaaccatacgggcacctggaagacttcctggaggaggaggactgaagtatacataggagaatgggttggaggactggggaggggacagaagagaaaagaacattccagacagagtggggttggaaggtaggcagccggccctgatgtctgaagggccgtgatgaggcgggagggcaggagcagctgaccacacggggctgcagacgttggctgcctactcacccagggcagtctagggacacagcttggcggtgacgcacaagtgcaggtgtcagcagggccccagccactcacgctttaccccagtttcacccatgaggactgaaatggcagaagagctgttgccctatggcttttcctggcgttctttccggtgaggcccgaatccttctggaatgactcagggtcaacttgcacctgtgccaggaacttccatccaatgatcatgcttccatctgaacaatgcacaagcacgagtcggctgctgctggctgaggaggctccctggccatcagcgtgaacactgtcgtgctcctgcctagaagccctggctgttctcttaaagcggctgtgagtggtctgtggggaacggtggatgacagagttcccacctctgcctccatgcagggtggggcttccaaggtcagagtggggctgaagcgacggtggttcctctggccggggttggacatcggatgaggcactgatgtcagaacatgtgcacgtgtgaggtccaaggtccaggccagcagaggagggggctgcacatctgagcattcggtggggggcgttgcacatcccagcactgggtgggaaggcagaactggagcagccgacccgccctggatgtgcggaaggggcctccagagccaccgggcaggaggcagcggggctgtttccacaaccaggccctacaggtccagactccagctgtctccgagggttgcagggacccccaaatgtgtctgcaacctgaaaaataaaattcactggctccaaaatccaaagagaaaacaacagtgcggttaatctctgttgaattcagtgtctctgatatttaacacggggtcaacgtcacgacccatttaagctggtatccataaacgcatcacttcattgcgtgtagaaccactcggagggcaggtgttcccaccttgcaagaatccttgggtgtgctgatggcggctggggaatcacaggagctgctggggaacgatcagtgtatcactcacggccaaacaagttcaaaggcggaatgattaaatcacttctgaatgtttttcatggcagaaaggtacattgaacatgggctgtgggtgtgatgtctgatcagacccaggcggggaccgctggaatgcaggggggtggagcaaggtccatagaggtgggtggtgggacctgggaaagccaggaaggactccccacagagagactgggtggtgcgtttattgcccctgaaagtccttcccagagcagctggagccaggagatctgccttctccaaggcagggaagggcctgagagcagcttcgctaaatcattcctggtataatcgcatttcagtggcagggcctggtgaaggcaggaactggagcactatattagaaagaggatcctccagggaacggtgatggcagtggatgtcctagaaatttccgggctctgccaatcaggaaagatgaggctaagcagagagctttcagcagttacgtggggggtgttgaggtgaggacccaacaggtgtcccagctcagcggagatgccagctcgggcgctttggccgccgggtgcgggcagccagcccagctcaccgtggcagagctggctgcagggcagcacagagggccgctcgacaggcggggcaggctgcgggagaacaggagggtttccccgtcatctgtcactcccaaggggcatgggggagcttctcagcccatgaccacacgtgcagctgctcccagcatcctgcttcctggtcggagagttacagtgtgtgatgctgctctcttgcccttcctgcataactcacaggggaaatgatgcccaacgcccagtgccatcctggtgcctgagtgacagccccggccagcctgctcctggggaggccattgctgtttccagggcaggaggtgatgactttgggcaattcctgcacggaggggactcctcctggctcccaggagccactctcacccacaggcagggggctgcgtcgcttcacgtggcatcaggagggcagtggttctgtactcatgcagcccgcacacccgtgcccagagacgtgcgctggcggaagccatttctcaaatcggcaattatgaaaacgccctgcccggcgcttattatgaccattttcctcctcattgctaacatgataagcaatgcaagtttttcctaatagaaacaataatgtacaaagaacttgattcaaattaaattgtctcattactttgtaataaatcacccacaagcatttcctgagcactaccaggcatgttacctgccaggaacggctggcggaggagacagatacggcttaactgcgctcatgatcatgacggggtgtgatcagcgctccctgccgagacgaacggaaacgtcgtctaggagggagaatgctaggagggagaatgccggccttggaagctgagcaccccggtggaaccccagcttccccaaaccagcgccacgcccctggccaagttcctcaacctcgtcgagcgccagtatcctcacttgacgactacagatgtcaaccacagcctggagaccacagtggggtgggaagctccttgtttaaaaggcccctggccaggattcagcactcagcaggggctggaaggctattagcatgtgagaatgcaccttagaacttgcttcattctggagaccttatgcataaacagatattttcacttgtccccaggtaaaagactctcctactgagatcagcagaggcctgcccttgggtgtccttccttatggagagcaagacacacgggtgtgttagccaacaaggagaaagtccccacactgtttgtgtctcagaggtgggcgggtctctgcacacagggctgtgggcagatgggatgagggcagggggcccccaagcaagggatgccaggatgcctccctgtgcttccaaagctggcacggactctgcggtgccaggcagaacacccaagtgctggcccaaacccgaggagctgtcctgaagtgagctctttccttcccccacagccaacctgtctgcaagtaccatgagtatctctattctgagcccactgaaaagtctcctctgaattcactctttatgtaaaaaccttaaatcacactgtatctcccccacttaaaacaccccaacagatccccaccatacttttcttttctttttcttttttttttttttttagagggagtcttgttctatcgcccaggctggagtgcagtggcgcgatcttggctcactgcaacctccatctcccgggttcaagcgattctcctgccccagcctcctgagtagctgggattacaggtgcccgccaccatgcctggctaatttttatatttttagtagagacagggtttcaccatgttggccaggatggtctcaaactcctgacctcaagtgatccacctgcctcggccttccaaagtgctgggattacaggcgtgagccaccgcacccagcctccccattataatcgaggataaaatccaaattctccaccatggctaagaccttttgtgatctgattcatgccccttctcctcctgactcctcccattccagccatgctgccatcctctcttcctccagcaggtcacactcatctccacacagtgcctttgcgttgcctgtgcaattctcaggacactgctccaggtctccccgagccaggctgctgtccctgcaggtcccctgggtcacctccagagatgggccttgccgcctggtggctgccgtcctcctgtgtccccagccctccagcttttctctctgctttgctttcttctggccagttactatgtttgaaattgtgatttgcttgttcactcatttgctgtctgactcccccagtagcacatgagtgcccccgaaggcaggacggttctgcccaccacactctgcagccttggatggtgccagccaccggtgttatttttggaaggaaggaaaagtgctgttctaggtggagaaggcccactttctagtcctggctctggcaagagctggcagtgggaccctggacaggaccctcaaccaccctgagcctgggttttcctgtctgcaaaatgaaagaccaggatatctgagcagaagcttcatcagtgctcctgacgcagtgaaggaagcctgagctgggacctcctatgtggtctttgatgcaggctgggtgtccccctgtcctgatgtttcctgacaaaggggttttctgggatatggggctgtcagttttaaaaccaagatggtcctggacaaatggggtgagttggtcgcccgccactgaaggtccaggcagcctgcagcgacaggtttgcccagggcacatgcctccactagcagcagggccaagtcacactgaagcctcagcctttgactctgaactgaatgttctttaaaaaaaaaaaaaaatcaggggaacagtacaactgcctggcattttgctgtgagtgcaggaagggactgttgatgacttttccttcattcgttaattaaaatgacaggccaagcctgccccatctgtctgtctcaaagctcgcccacaaagaccatgctggcgggccatgggacaggccacaggggtctccttgtgaggcaagttcccaagtccctctggtgggggtggggagtagatggccccacagctacaaaaccagaaatgtcctcctctcccgggaaccagactcagtgtgacagtcacctgatgtcctgggctttgtagggaaggctgattctagggctgggggcccacctgcagcccgtggtccccccaccaggatcacctgcccaacctggatggcacagagctgttgagtgggaggccatgagaaacccaggccaggcccatgccggaggagaaggccactgctgccgtccacccctggccaccaacctccctccactcactagggccactgaaaagtttgcttctcttccaagtgctgatgcttcattaagagactggtgtcaccagaggggcagttgtaaaaacagttaaaagtaggaggctcatataatttggctatctgtcccctccaaatcccatggtgaaatttgatcccaatgttgttggtggggcctggtgggagctgtttgggttatgggagtggattcctcatgaatggcttggttccattctcccggggctgagagagttcttactcctagttcccacaagatctgattgttaaacagagtctggcactttcctcttctctctctttcctcctctcttgccatgtgatgccagctccccttagccttccgccatgagtggaagcttcctgaagctctcaccagaagcagatgctggcaccatgcttcctgggcagcctgcagaactgtgagccaaagaaacctcttttctttatcaattacccaggctcaggcatccattactgcaatgcagctgaactaagatagaggctgacacattgtaatgggaagtattttaatgatgtccccttttttttttttgagacggagttttgctctttttacttgccagcttggcatgatcttggctcactgcaacctccaactcccaggttcaagtgattctctgacctcagcctcccaagtagctgtaattatgggagcccgccaccaggcctgtctactttttgtatttttagtacagacggggttttgccatgttggccaggctggtctcgaactcctgacctcaggtaattggcctgcctcggcctcccaaagtgttgggattagaggcgtgagccacaatgtccagccaatgatgtcctttggaaggggttctgcaaatgttctagaccaggcaacggcccagagagtgaacattccaggctttgagggtggatgggtggtccctgttgcaactactcactctgctagttgtggcacagaggcagccatgacaatatgtaaatgatgggtggggctgtgttccaataaaactttatttacaaaaacaggcaatgggccagatttggcctgtgggctgcagtttctaaagataggctctaaatattctaacgacatttaagtccacacaaataatacatgtacatggcatataactatgtataataaaaactaagaaaagtctcaatcttgctgcagaagccatgctgacattactgtgtacaggtgtgcctggcttgatgtaacacctgagctctggaaaagaggcaaggagaacgcgttttagaaatgagatcatctgtgagatgcctgagaggttcagaaggatcacatggggagtactttctggaaaacaaagaaacacctctttactttgtctaggtttttatgctctggttggctccaagtggggatagacctgaattctggcttaatgagtaataattcataattagagtaattagtgtaattattatgctacggcctttgagcaccttccacacaccaggcgttgttctaagtgttctgtgggtttaactaattgaatcctcataatgaccgtatgaggcaggagctgtgatgacgctcactttacaggggagcaaataaagcagagaggttgagtgatttgcaccagaacacagggctggaggcaaagccaggctgtctgaaccactgtgggttactgaacgatagtgatactgaagcactgttgattcctggccaggtgggggccagttccccgacagctcacagccctcccaacccagacaatgacagagagaaaggaaagaaccctcaggggaggcgttggtcctagcagcatgttctggagaaagaactggagaaggaattggtgatttactgtcctgccagtatctgagctgctgggagggcaccctgggatgctctgagaagattttgccaggagatcctgctctgtatcaaaaaatttgaaattggaaatggtggaccaaatgctgggctgggtaatgccagggaggaaggacacggtggggtgagcaaggccaaaggcaaagcaaggccccacacctaaaaatgggtgcaggaacatctggataaacgtttacagttcacaccccatgctggttatggctgtgttttatgattcccatctcaatgaactggcaatgtgtcagaagacaaggcatctcctgggcacagcaggtgtgtgctggtctgtggttcacacttttactcccacctacaacactctatacctgctatctctatcagttgaactcctattcattcttcaaagcgcactgcaatagccaccacttccaagaggaccttaatgctgtccctcacgtgacactgtgtgcttagagggaggggactaagtcttctttctccaccacacccagctcctgtcacagactctggcactcttcccagcttgctgcctgctgcagcgactggaaaagccagacacttgctattgcagcctttcctgcagttatggatggtcatgaccctatggaatagttttggccaaggagacccaaggccaagcggacccgaggtctgctgggacctctgggaaaggctggactatttggaaagggagtgggggttggggaactgctccctggcaccccctcctttacgttcctgagtaggacgtgctatggggacatcatacttggagctatggctgccatcttgccaccatgagggagaggccaagaggccttcagagatgtcactgcccgtgcaatggatgctagctgtgccctcctctggactcgccattgtggtctcagccactgtgagtgaggttttttattacttgcagccaaatgctttctaatgaacataatgtgaatatttggagcttggagtgagggggcagggtagttattaattagaagatacgggcaaaacactgggatggcttcctgacaacttaagaggtctccgagttatattctgggttgggaaacactgacccagcccttattccttcaaggactctagtcattggcaaggaggattcatgagccccagtgacacagatgggggccctgctctatattcaactgtccagagaagatctagtcacaacccctcatctcaaatgaactttggttcagaaaacagaactaaggaaaagtggtttccttggactcaaccggtctgaatttcccactaaccacaacactgacttcctgagcaagctggctaatcccacgtatacaggcaattacttgtacatcacagggctggggacaacacacaccaaggctgagaaatctctaaaaagccaagtgaagtaaagggagacagagtttaggtacagaggggaacttagcaacggagtggatcagaagatacagccaaggcccacggtctggtctggacctgatgagtggatgtctgaggccagacgctgcctctgctaatgggtccctctgctagacctgaggaccagcctgtccacagactgggcttccagacaccccagacaagccacacagttgcaaagtctttgtcattcaatgcatccagctgagcggccaacatcctcctcctggattcagcacgtggtgccgagtctcctctatcctttaagtgttcctagaacccgggccaccacccacgattctgaaaattagcctcgctcgaatgaaaccctgccttccctctgaccttccatgacaccactgatgccctgtctttgtgaccggacccttggccacagcatgggggctgaagcgtctcccaatgaggtaaaggtaaggctggttgcccctggacaaccctgctcattgcacccacccaaggaagtccaccattaatatgaccacgtccactgctgagatgacctccaagaagcgggcaggcagggaaccctcagagcaccaggtccaacacagcacgtcccaccagaagccctgttgagggctccggaagccaggctccccctgagcccgagatgcccactccctctcacactgctctgcactcgaccaccaaagccagggtccttgcgtacccatttcccagatgtgtgcaaacttctcgctgaggaagacacatcttaagaacgagctgcttgtcccagttgtaggctcgctccttctttttgcagaaggttccagccctctgttcccttccaccatctccactggcatcctcactgccatttcccatggtgtccagttcatttattttgttagggggccccctccaaagacaaaagacaaccccttgcaccaattttcccaggtcttcagccccagccagtttctcactttaaatcttccccattctccaggacttcctgatttccttctcattttccttcttgttcttttgttgtgttgttgtttgtttgtttttgaaacagagtctcactctgtcacccaggctggagtgcagtggcacgatcttggctcactgcaaccttcacctcctgggctcaagcaattcttctgcctcggcctcctgggtgggaatacaggcatgcgccaccaggcccagctaatttttgtagagatggggtctcgctttgttgcccaggctggtctcaaactccagggctcaaggaatcctgatgcctcagcctcccaaggtgctgggattccaggcatgagccaccacgcccagcctcctgcctgttctttattaaagctggagttatctgtcctgcctctccctgcctctccctgcctctcgacctgctcatttccagtctgctaagaacaggctttttttttttttttttttttttgagatggagtcttgctctatcacccaggctggagagcagtgcagtggtgtgatctcagctcactgcaacctccacctcccgggttcaagtgattctccagcctcagcctcccaagtagctgggactataggtgtgcaccaccacacccagctaatttttgtatttttagtagagacagggtttcaccatgttggccaggttggtctcaaattcctgaccttgtgatccgcccgcctcggcctcctgaagtgctaggattacaggcatgacccactgcgcccagcccagaactggtatttttctaactgcgaactgtttggtccatgcccctgaccccaagtccaggctgcacaggtattcatttgccttgacatacatcctccagatatccccaggttacctccaagctccaacacactcactctccttagccaggggatctcagcatgctcgctaggacaaccttcctcccccgccctcacatgactgggaagaagaagacaccaggcccgtaacaggtgacggcacggggtcatccgtgcaaatgcaggtagtaaaacacggctgaccgcaacgctgggctctggcaggccgggtacgcacaccatgccaagccccatggggagcccctgccctcattctctctctcacacaacacactgtggagggaggcaccattttctttcccattttacaaacaaggaagctgcggctcagaaaggtccagtgaggagctcaaggtcacacagctggcaaatggcggagctgggcatccaacccccgaggccaactgcagagcctgttcccaccaccagcagccagccagcccccttttgaggagcagggcaggcctatccccggaccatcagggaggtgggagatctccctgcaccctcggccccctcttttggggtgtgcacctgcctggggcagtccctctgtgcctggcagcagcggaggcttccagccatcagctgtctccccatgaccagtacaaagggctgtgtcccattcccctgtgctggggagaagtgggtcagggctgggcctgggtcctgccgaggaacagagggcacctccactgaacgggaggcttgggaggcccggtgccatctgtcgtgctgactatacgccccagggcctggaacggtgtctggcgcattttggggtatcatgaggatgtctgtggcctgagcaacagaggccaccgctgcccgctgccacaccccagccaggccctctggcccatggagtgacaactagaaccggtgcccctccctcgggaccctggacgtccacctgccaacagttgtgtgatccattcccaaatccacagagcccagggtgactgtggcctttggggctgcacagtcccttcccagacccctgtgatcactgtgactggaaatgacttggggtcccacggaggccgacgggtgggacaggggtcggtggagcaggcagcatgcagtctgcacagtctgagagaggcggcatttcctgtccttttctactgcatgtcttggccctggggaagggagcagaactcctgcagcctcggtttctccatctgtaacgtggggccatcgcaccccatcccagggagttacacactcacagctaatgtcggccaaaacagcctctgtcagagcgggttctcaacctcttcagtctatgcattgaatgcttgcaagcactctgtgagtgtcctgtgacggctgtaacaacgtaacacaaacttggcagctagacacatttagcctcttacagttctgggggtccgaggtctcactgggctaagactgaggtgttggagggcgggctccccacccaggctccagaggaggggctgcttgtgttctctggtttctagtggccaccacgttccctgacccatgatcattcctcagatcactccagcctccgctcccatcgtcccagctccccactctctgcctctgaccccctgccctctgatgaggatccctgtgatggcacagggcccacctgcattcgccaggaccatctcctaatccaccaccagctgattagctgacaagtccccctctgaagcttcattccccttggccgggtgaagtcacacactcacaggccccaggggttaggacatggatgtctctgggctccacagttcacttggccatgccaccccagcctctctctctttccctggtgaggctcaaggtggatgaggctttaatatggagtgggggtgttttcaacaatctttcgcagattgtgggctgactcatccaactgcaggcaccgtcctccttgtggggactctcaacaggatgcaggcacacctcagattgggcaccagcaagcaagcaggcaggtcctgcggccgagatactcccacactcttcctagtaaatcacactctccctgggtgtgaaccatccccgtcaatgctcagaccacaggccagtacccacttaaaaggcaactggctctggggtgctggtggcccagctgacaggtgccctgacttgcaggaggactcagaggacactggctgctcggggatgcctctgcatctgtgccttggggctgccggcacctgctgggagggtcctgcctcttgaagcacacagcggcaccggctctgccaagtcccccgttctctctctgctgctcagcgtggggtcccttttctcttggcaaagtctgacggcggaaaccccctgaataaacagctcctgcacagagatgtttctccgcggctcaggattcgcactggaggagaattcagaagtccaagcccatcatttgatgctgccaaatttccgccagcctcagcggtaaccttctctggcaaggttaaagggtctatcagattcccggcccagaaactaattagataaagaggaaacctgggccccctggggtatctcctcaaaggccgaaaggtgcacatccaccacatccaccccaccatgcccagaaatgggacccaccagcggcactgcctcagccaccctggactgtaaccatccaggctctcagccggatccctgctgtacctccacaggggagaggccagctcattcgcatgaagggagactgaacggacgctggggcacgctgagctccccagattactcacagcaaccctcctgcccatgccttttggtttgggaggcgacccaagcccagtacctaatggagtgactggggtgggagcacgaggcaagggtatccaggctccacagagaaacccctttctggataccagagctctaggttttagcaacagaaaccacctccagagatcttgaacactgtggggttctgcacgggcttcaggtcaaagatgtggaggggcggacatcaccgggctttataataacagggtctgggcatgctcggggtgaaatctaagggaaacgcatctgggtgtggccttcccccaggcaaggggctgcggcttttccctttcagagaaacaggagttcgacaacctggagaagagtataaggcagcccaaacctgctggagggtgctttgtgagagggcctttgacccacaggccaggttccaggactgatccgacagaaacgcaccctcaagagcaccacaaggccgggccagggctgctgctgctactgccactgtctgaactggaaatatttgagccatctccaggggacatgctgggtccaccccacccccggacggttactaggaaggacactgtctacacgaacccatgggcatggaagctgggcaccaacagagtgcagaaacaaactgcaggatgctgtgtggcggagcccgctgtgccccacaaatacatgagaggaggacacaatgatgttgcaaaggctggcgggaggatcaccgaaggtcaggagtttgagacctgcctggccaacatggtgaaaccctgtctcaaacaaacaaataaataaataaggctggtgggcacagccagccatgcacagtggccccttctgggaagtgggaccaggaggatgatattgactttctatatttctgcattctttgaatatcttgagatggaaaagtgggcactgttgttttctaaaacagacaatgaagatgggagggagagagggaggaaatgggggaggcaggtaggaggaagtttccggtttgcccaaggccacagagaaggaggcctggagcccttgtcctcccaggtcggggagcatcctggttcctttgttgaactcactctctcaggacccaagagcagccgtggatggaagaaaatgaaaagacaaaacgcaagtcctaagcacaggaggatgacgtgaggatggggaatgacactgctcttcaccgcaccaccgaggcatgggtcaggtgttaccctgaaggtgaggaaaccgaggccaggggttaggtgacaagtctaaggcagattggctggagaagggcaaagctgggacgtggccgagagggttggtgtgaccgctgagccacatcccctgtaagacgctgtctccctgatggcctcagtttccctgctggtctctccaccaggctcaccgctggctcaggatttgacaattaccgctccctccttttttactgaaattttttaattttatttttagagatgggatcttgctttgttgccctggctggtctcaaactcctgtgctcaagcaatcctcccaccttggcctcctgaagctctgggattccaccgtgcctggccacttcctcctttcttttccttagtcctaaccttcttcctgtctctggccagctctcacctcagcgagctccactctgccgtttctgtgtaattcagcaacatgccctcttccccacccaatccgtgctgcttttaacactttccttccacccctggaacttgccgccttctaccgatggtgcatctctgtgtctgttagctcactgatatgctgctacatgctctcagagtttcctgtggacactgtaacaaattgccacaaaccgggtggtttaaacagcagaaatgggttctctcacagcgctggaggccagaggtgcagtatcagcatgaccactgtggtgaaatcaaggcatcggcagggccacgctccctcaggaggccccaggggaggaaccctccttgcttcttgccgcttctggtggctgcagcaggcattccttgtcttggggtcaatctctctaatctctgcctctgtggtcatgtggctttctcctcttctagcttcatgatctcctttttgttttttttttttcagacagagtctccctctgttgcccaggctggagtgcagtggcgtgatcttggctcactgcaaactccgcctcctgggttcaaacgattctcgtgcctcagcctcccaagtagctgggattacaggcctacaccaccacgcccagctaatttttgtatttttagtagagacaggatttcaccatgttggccaggctggtctcgaacttctggcctcaagtgatccacctgcctccacctcccaaagtgctgagatgacaggcgtgagccactgcacctggccctggatgcatagttttgaataaatgaatgaaaagagagagagagagacctgggtccctgtccctgctactcactcttcatatccacggcccctctcccagggtcttcactgtccccgtccccctacccagtcatcacccttgaagtgtgaaaaatggctcccagagcctgaaaccatgaaggttcaaaggcacactcctggctgggcacggcgcatgcatcccagcagtatgggaggcagaggtgggaggattgcttgaggccaggagttcaagaccagcttgggcaacctagagagaccacatctctacacacacacaagattagccaggtgtggtggtgcacacctgtactgtggccccagctacttgggaggctgaggtgggaggatcacttgagcccaggaattcaaggctgcaatgacctatgattgcaccactgtgctccagcctgggcgacagagggaaaccctgtctcttagccccctacccccaccccaaaggcatactctctggtttcctaggagaatccggtttggtatctcacactcccttcacccaggaagcacaggctgtggaaagagtgtcaaggtgggagcaggtaaacccttggcccctgtccgtcactcagtgtgactcagtgagtgcctgagtcacactcagggccagggacagtgcccctggccctgccaatccagtgagcgttgttggtcccagccctgccctgtctgaccggctgcagcccttctgataggtcacatgcctcactctgcctcagtgtaccctttaggaagaagaagggactccagagatccctcttggctcaaatgcaaaggtgaggataatttgggaaaagaggcaggacaattactttgtgcattttggcagtgggaatgctgtgctgcagaaaggtgaggcaaaggaccctgggcaaggcctgaccccaacaccaccttagtccctgcctgaggtccctgacctcagtccaagccattcccccagatggtgtggccagaggactccagttccttaatccctgccttcccatctgacagtcccagaggcttggcgaaaaaacccccaaaaaacaaaaaactggcaaatgaaacccaggaaagaaaaaagctcccaacctccagtctgggcccctctcttccaatctgcttttgaactcgctttttccaccctcctcctgccgcccagaaaagagctgccatcttcctggctcctccccttcactcatcttggaggcctcagagctccacggggccaactccaggccaggggacctgggacacatggtgccagctgttataccaggcattagaccaccgagccagcctccaccttgaccttgggggcagtagagtcaggttttaatcagcacatgccctgaagagctaagccctgcttgttggttggcagggcctgggagtgcagcctctagtcctgacccatctgaccaagctccctgacagggaaagagagggaagcagattccaagctggaccctcccgaagacttggatgggctgcatctctttgtaatcctaagcatggggacaggtgcccagtgcttcattctgtcctggagagaacggggcagcagagccctagggaggacagggggcagtctcaactccttagactgccctgagcacttttcatgacatactccttggcactggggacacaagtctccttctcactggggccatgctatcctctccttcccatgaagtgaaaatttattgagtgctgacaatgtaccaagtactgcctatagagaggtctgagcacactgcccaactttggtccccacccttaccccaagtcacagattcagtcagccacccacccactcacccatccatgcatccatgggtccacccatgcactcatccatccatctgtctacccattcattcatccacctatccagccatgcccccacccacccacccatccacacacccatccagctccccttccttccttccttccttccatccatctatccatcacccatctacccatccatccatccatccacccatccacacacccatccagctccccttccttccttccatccatccatctactcatccacccatccatctatccatccatccatccatccatccatccacccacccacccacccacccatccacacacccatccagctccctatctatccagccatccatccttccttccatctatccatcatccatctacccatccatccactcatccacccattcacacacccatccagcccctcatctattcatccatccatccatccttccatctatccatcatccatctacccatccatccattcatctatctacccatccacacacccatccagctccccatctatccttccttccttccagccatccatcatctgtctatccatccatcttctcacctctctctccactcaactctccattctctgagagctggacatttgccagaccctgtgccagatgccagggagaaggagacaagtcagtcagtcctggtcctatctggaggagacacaggtgtagaaggacaggggtgggcagagaaaaggcagtcctgcatggcccaggtaatgttgagtcagggaggtctgattgcttctcactctagctctacaagtcaggcaccaaagacacctccctgcttcctggaggaaggcccagagcaccaggctttgggcagaggcggggatcagtgtgagcatttcccgaaaacctgctgcttcccaggcacagccttgggtacccctccagaaccagtctcctcatctgctccctggagaggcaccccttggccttgtatgccactgatggcccctgtctggaccccaactaagagcactcctgcccatcttgggctgccctctggatacctctgcccactctgggtcaggccctggaatcccaaccctgcccagcctgtctcagggtttgcagttttgtctaaagcgcattcattcatggtgaccactggccagtggttatggcagtttcaggcccaatgtgtagaattttatattcacaagagatctcagcaatgatgtaggcattttacaatgtagccatcttacaaatggggaaactaaggcccgtgcaggaaggtgatgtcagaactgggaccaggacccctggcacctgaactcccaggcctaggcctatcaggcttgaaacctgcttgctggagcttcagatcagcacacttcattaccctgtgtaagaccccgactcagagcacaaggttggagcaggggtgcagaggcacggatattgcccagggatgagccgaagctggctcttaggagctgccagggctgactgtgggcgcctctttccagcttgctcagtgacctcacgttggcagctcggaatgggccattgtggggcaatttacaccactgaaatcagtaaatgctaccaatcaaggtggatataagacaggagcacgagaggggccaggtacagtgtgggggtaggggggtgggcgggggcggtgtggaggcagaggtcagctttggcagctattgtcagaacagctccagagagaacatgactaactcctctcctttgcctgccggcggggctcagggattttaggagacagaagattcctgcgcagctacagagctcctgagctctgggggcccctgccccatccaggtggggagcaaggcaggcctctgggagtgccctcagtggggccctgcctgaaggtgctgaatcccagccccccaggccctcctctgctgctgctccgatggccccacccaccaccggtgtccccaccatccacccactcgccacctgggaaatgtactaaacgtggtctgaggctgctctgagccaggagcctccctgtggtgaggaactcagctcccagccccaaagcaggggacttgggtccagaacaaagcagccagaccttcctgcctggccccacagaaaaggccgtcatgagggtgtccaggctgctgagagcttggcctccctgctctccagccagagtggtcctggagccacttaccccaacctgaagaccaagtgcgcccagccccaatgcagaacagttgctgagctggatcccccctgcagggcatgaggaggcccctccccttctccaccctcagaacccatccaactgctttcagagggtctgagcgtacctccagccagaaaaacctaccctcaccttggtctggggccaaggtccaaagtccccaagtcaggtgcttgacgtcataaaactgcaaggggaagttggccgtggccaggtcggagcacacctaatttcgtgcacctaatttcgcatcactgagtactggagaaggaggagtccaggcctggcccagccaagccagcagccccggccatcccaagagactcatgacccactgtgcacccaggaaacatagcaagtgtcagctttatgcttggctctttgaaattatatatttcacagatgatatctaagaaatctgaatctcaaagctccgtgacagaggcagaatcacaaatgctcatttgcagatggcacaggcagagctgagagtggatgatcttgtcatggggctggcaggtggagaggctgggagggaacacgggcttgtctaactcatgagtctaggccctttgtgcctcactgccccctttcccatcagagagcctcctcccctttcatgactcggcagggacactgcgctcctgggaccatgtctccccaccacagctctatcacctggccacctgtgcaactcacttcaagataaacagaccagcacttcaattttcaatttggatcctactacttgtcccataggtatgcatgagaacctatgtctatctttgcttagaacttctggtgggagtggggccaggagcatgtctctaagcctctctttttggtgtttgacctgaggaacgtgcagttcacctgagctctgccgtgagagcagttacgtgcagagatctgcccatacctggctggctggtttgttcacaaagagatccggaaaccacttctctcaagctttagaagcttatcccattgttgaaaggaaaagctcttggacagtaacagtgtgattgacaaaataataacttacatagacaggttggaagttaaggacatttcccagaatacagagcaagaaggcaaagaaaaaaatcttgagaaagaataagtgacaaatggggagaacgtaaatggtctaatagaggaaatccagaaaggctgaactgaaagaggaagcgatggaattgtcaaggaggtaataaaataccttcttgaagtggaagctgcttcagtctggaggggtctccagagcaatgagctcaatgtgcaaaggaagcgcacactcacatccaccatcagatttcagaacactaagaaaaagtagaaaatatgacattcctacaaacttctagggaggaaaataaagggtcgctacctacagtggaatgagaatcagacagtgctataacttcttactggcaattctcacctgccagggataaacaggaacattgaataatgagaaaaagatcaattcagaactgggaacagaacccccagacacctgaacttccaggcctaggaccatcaccaagaagacaaaacagtcctgaatgagtacaaacctaacatcagaacttcaaaatacatgaagcgaaatccgagagaactgaaaagaaaaaatagacaaacacaataatattggagaatttcagcattcctctctcaaaaattgacaacagaggacaagtcagcaaggctctaagccatgagtagagacgggatggtgatgaagcaatgcctggagagttttgaaactggagttctacaacctggagaacatttgataactagggaatttccagacagggaggttacattccagataccttttgttgaagtggaggatgtatcctgacagaataagggcaaagaaaagaagcaactcacgtatccactagctcagtgaagtgaagttgcaggatgatcgtcgtgtactgagagctggagttcaaattggagcagaatgtcagaggactccaacaagaagaggacagattccagtgatacatcagaaaaagaatgatattttagtggtatgctcaagaagccataatttttctcccacgagaaaaaaaaaggcaatcagaaactccaggaaaaacaaaatcttcatgtgaaaatcatgatcctaatattaagctgaaatgtagaattactctgaaacactgatagagtggaaaaaaaactcattgggttgtgatactattagtacccttcttctcataggtctgtaaagaggaattggaatactaaccccatttgtattatcatcataatgtaatacttcccatgtttttttttttttttttttttttttttttttttggtgtctatgctggtctcgaatgcctgggttaaagcgattctcctgccttggcttcccaaagtgctgaggttacagatgtgaaccactgtgctcaccctccactgttttttaacttctgagtccaacttggagacaaaacttagaacccataaatataaatataaatataaatataaatataaatataaatataaatataccaaagggtcgagtgatagtgtctaaaatgtattaaacaagagagagaagtttaagaatgttatttaaaggtaatccattagcatactggcaagaactattcaaaattggaggtgagggtcaaactatgaaagcctcattttttccagcaatgtgtcaaggatgtttcacattttaaaattaagaaatacgggagtaatcatcacgttgggaagatacccaccagaagaatgaagcagacataatttaaaaacttttttttctgccaagtggggctgtgtggatgaggctgggtcagagtgggcacataataatttatttctactcttggccctatctctgtagtttaattaattactttcattacatgcatgcagtacttggatgaaaatttatggagggaggaaaaatgtgaaactgagagttcactgagaatggatgaggggaggggtccctggggcagccggactgtggggtgctaaggggaacagagaacatggacaagagccaaggggccagcccagggaaacagcaggaggacgaggagaagacaggactccttgacccttgtgatggactaaaggagggaaggagggagaaaggcaagggagaatgaggagggggacactcaggtcccccgtttaggcactgggagggctgtccatcacaatagagaccacagagaagagcagtactccctggagaaatggctcacccaaatggagacctggttccggccaccatctttaccatgctgggagagcgcaaaggaagagctgggccatctgtggttgtgatgccttcctttgcctatgcccagagaaatacctctctgtttcaaaaaactacaaaagaactatatacttgcaaaaataaaaataaaaatatgggccaggtgcggtggctcacgcctgtaatcccagcactttgggaggctgaggctggtggatcacttgaggtcaggagttcgagaccagccaggccaacatggtgaaaccccgtctctactaaaaatacaaaataattagccaggcatggtggcacatgcctgtaattccagctactcaggaggttgaggcaggagaatcacttgaaccagggaggcagaggtcacagtaagctgagagcatgccattgcactccagcctgggcaacagagcaaaactctgtctcaaaaataaataaataaatagtaaaaaaataaaaatacagaaaatgtatgaaataaacagtgaaataatctcttgccctgccccaaactatgcctcaaagaagccgccatgggggcttccaaattaactgcgaggcccagccttcagttgagagtaaggaacaaatggggtgtgcttccttctgtgtccagacagtagacatactcagggataaagccttcttttcaagtctaagaaataagaaaaaatatataaaaatacaaaataatggcggaggaagaatgagggaaatcaatgtttcttgccattcagttcttacaacctacacactgaggcagtcttctagagcgcagagttagggtttcaaaggaaagccagctacccacacacactgctcacaactcagcacccctctggatttatatagcacatgcctcttaggagctgcaagtactaaacatattttctcattcatccttaacacgaacacaactggagatacagaatgagttggaagcagctctactttgcaaacaacaggaactgaagactcagggaggggaggcgagctacccaaggttgcatagtgacttagctggaaagccagagagataacttaggaccggtgatttctcagcgtctttagaacgcttcagataacatgcatatatgcttctatttgcagggcccttctctagaaagagcctcaggaacccagcaacagagattctctctagggagaagaacttggggaccagaaggcaaagatgggagacctactcttcacactctatcaatttcctgcatatcttgaatttttaaaccaggtatatgtatttcttattactgatttagaaaagataaaaattgggctgtgaggctcgaaagccatgaaaatagggagctgtggacagtggatattcaatggtgagcaggcatactttgccatccttctaattcgctctctaagagaaaactggttttctctaagggagaacaaaaaacagatgctcagcaccttcttaaaccttttccttgagtggcattaatggacatgttccttttgagcagaccttgctgccagtaaggatgtgcctctgggagctcctcccggcaaaaacgaagagaaggtgagaactaagtcctccatgctcttcctcacctccatgtccatgcccctatccaatctaactccatcctacccctcagttccatccacctctctaccccacctcctccaccagccccaaccaccattgttgcttggcctgaataatggcaatgggctcctcactggtttccatccatcctgccatctgctttcctccagaaaagtgattcagatgatgtctcttctgcctaacgccctccaatgcctccactgcaagtgcgagaagacccaactcttttcatgaagcacgaggtctttctctgacattactgcctctaatctcttctaggccatggctattcctgcagtgtcgaatcttctcatcaccccagtgcttctgcacttgctgaaccttctcttgaggggtgattcctcctcaatctttgtgtttcaactcaaaagtcacttcttcagggagacactccctccctggcatccctacataaagccggcatgacccaacctcccaggattctatgacagcactcatctgcttcatagcattaactacaaagtgagatcctctgcttcatttgttaactttattgtgtacctttactaattagactgtaatctacttgaagtcaaagaatgtgcttgtcttgtttatatcctcagctcccagaatagtcagatcttgataaatattcattaaacagatggacagatgaatgcagtggttgggtggatgggtggatggatgggtgggtaggtaggtggatggacgggggagtgaacagataaatgggtggatggatggatgaagagatacatatggatggaaggattcatacatggatggatgaatggatagatggatgtgtggatagacggacaggtggacaggtgactgggtggatagataaataggtggatagatgagtgatagaaagataaatggctgagtgagtggatggcgggaaggatggatgtataaatggagtccgttcagcctaaagtgagaccctgagttctcccccatcccaccaggtagatttctctggagtatcccatgatgaggctggggatttggttaacgaggagtgggaacttaagattcccattccctgagtggagacatgtttttaaaaatgacattgaaatatctgtaaagtcccaagtagaaatggcccttagggcctctgctgtttgaccttaattaatgtggccatttctagatccttctctcactgttttccgggtgagtggaggggaatcccagggagggaattggctggaacagctgaatatgttcactaatgaattggtgtgtttcaacatttggctctccagctctgagactctgagcagtttttgacataagaggaggttggaaggggagaaacctcctgactgattcagaaaatgtctccactgagtctcacttcccatggcattttctctcattacacttgcatcggcagtggggtggcctcagccctgtgctgtctgcccagattgtgaccccacagcctactgtggataattggcccacagggctggcactgcacccaggtttctgctgctcattagtctacttgcaacatgaatgccaacaagggtttgtgagctacaagctgttctgcacccatgccctggtgaccatggcctccagatgctcctcctgctccattggagaagctggcagtcagcctctcactccacacccactccagagttatgccattccagggttacaggggtgcacaagacctactcatctctgtccacaagctcccatgctgcctgccctccttccatgctgcctgctctccttccacactgcccgctctctgcctgcactgcccaccctccatccgtgctgcccaccctctgtcagcactgcctgtccccctgtccaccctgccatgctaataggttcacagtctagctgaggccagttctgctggtcctgggcagggtggcctccctcaggctaaccctgcacccgttatgaaccagctcagacagtcagggatgaacaacgataataccatcatcctgaatacgtcaggattccactcatctgaggttcctagagtcatcaaattcatagagacagaaagtagacaggtgggggccagagtctgagggaggtggagcggggagtttgcgttaatgcagacagagttccaactttgcaagatgaaagacctctggagctggacggtggtgtcggttgcacaacacagtgaatgtcttaataccactagactagtgattcacttaaaaatggtcagaataggaaagtttatattatgtgtattctaccacagtaagaaaaaatgggggggtggggaaagaatgaagtactggtgtgtgtcactgtgtggatgcactttgaaaacatgatgcagagtggaagaagccagacacaaaagaccacgtagtggctgattccatctatgtgcatctctcccaacaatgctttgggaggtgctgactgttaccacaagaaacactggccctcctcctcgtcagtttccctcaacccaggctggctttgggcagtaccatcctcaccgcgggagggtggggcctgaatgccagggctctactgcccacagatcaggccgcatactcaggctcagatgctcattaacttggccttcctttccctccatcagtgtccctctagcaggtggaatgtaacacctgcgttaccaggttgctgggaggctcagctatgaacagggctgtgctccatgcagggtgggtggcgcacgggaggagtggataagcagggctgttgtgactcttgtttctttcaatgaaccacagggtcacatgaggcccacagcttgtctgatccctcgccatgggagtactggagctgactcctaactctgatcaaggctgaagctttttcaccatttgcttagaagctaccagttgaccccagtgtggtctgcatgttcctcctctctgaggtgaggtcccaggacctggcagaacaggtgttcagtacacatgtaaaacaaaagcccttgactggacaccaaaacagggatgcagagttggtggggatcttggaggtcatccagtccaatcttctgtgacattctggcaagagaatcctcagccctgcttggctccttctagtatggggagctcactacctcctgaggcagcctgaacagccacaatagttctgcaagtcttctcttggctgaactccagcccatgtccctggtattttctggccctgctgttagccatgtgtcacacctttactacaacaccctagccagctttgcccacagatgtctctcttcccaggcaggtccttcctctgctcctctgtggggagactcaggcactatgtatcattgtgcagactctgcttgctatcacagatcctatcacagtgtgataggcccactgactatgaccacctgcccagggtccacttctacaggcagccttctgctgctgcagaaacaattcatctggctcaaataaaggctcatcaggagaagctgtggtcagtccctgacctgcctttagggctgcgtttgtggccaggccatggatcacacttgggcttcaaggtcacaaagtgggcgagtgtagcaagacctggaaagtctgtgacattccctggaggggtcttggctcctctcctggctatggcattccttttacagcacacctcatttacaagagaagcggttgggacaggtcagcattataactgagtccaatgagcaattctgctcctaagtgcacacacatacttgcatgcaaatatcaacagcaatcaataccattcacaacaaccaaaaggtggaaataacctgtgctcactgatggataaagggatgagcaaaatgtggtccgtccatacaatgaaacattattcaatcctaaaaaagggaagaaaatccagacacgctacaacacgaatgaaccttgaagacattacgctcagtgaaagaagccagtcacagaaagatgaatacttcgggattccactcatctgaggttcctagagtcatcacattcatagagacagaaagtagacaggttgggagctggagtctgagggaggtagagtggggagtttgcattaatgcagacagagttccaactttgcaagacaaaagagctctggagctggatggtggtgttggctacacaacactgtgaatgttcttaataccactaaactagtgattcactaacaaatggtcggaataggaaacttcatattacatgtattttaccacaataagaaaaaattgggggcggggaaggaatgaagtactggtatgtgccaccatgtggatagactttgaaaacatgatgcagcgtggaagaggccagacatgaaagatcacgtagcggctgattccatctacgcgcagcaccgaggcaggcagagcccacagacagaagcaggtgggtgggtgcgaggggcaatgggagtgggagtgactgctaatggggtgacaaaatgttttggaagcagatagtggtgatggttgcccaatatcgtaaacgtactaactgccaccttattgtacactttaaaatggtaagttttaggttacgtacattttacttcaatcaaaacagacaaacaaaaacaaatcaatcagctaacccaggttggatccctccacaggcaggtctaagagtcgagtgcaggggtctgggctgctcatcacagatatcctggaggtcggggaagaacccagcgtagggcttccggaccctcccacctctgcaggagatgagtggggtcagcttctgagaaggggctcctcagccagcagggccgggcacaggaccctcacatccccggggcctgcacctgcacctccttctcttttctacctcacacactggcccttgttgagcttcaacatccaggaagaaccctctatctggggctccccacgtggaggggcctttccccacactcggggccagcaggacacctcccctgcccagcctcaacctcccctgcaggcaccccccagcctcaacctccccacagagacccaaggacttccccacagctggtgacacacaggtgtggtttctgcagaaaaatccaaccacgtgcctgtgccagtcacattgtcaaagatgcagggctctttccacacatcagacgaactcaaacctgctgtgcttagaagatctggctacctggtggctcgcctgcccccttccttcacagccattccacctaagcagaagtggcaggaatggatgagaacccgaggaccacagagaaggcagaaacccagacctgaggcatccgaaatactcccccgggggatgctgctgccccaatactgcctcaaggctcctgtggcccactgccgtcatccttgacatttgcatgctttcgcaaaaacaatgctacccagccctctccctggggccaccacacaggtgtgctctggctggacacaaaccaaaggtggcaccaagtacacctctcaggcaggggctccaggagatggtggcttccatagtcctagcccggtaacaggcacagggaggcagacacgaggggcctgaaagctgcatgcaagatggtccaaagcatttgcagcacagacgaacagctttgaccagagggtcctggaagagaaagcagcgcgtcttacctggaagtgtcgaagctgtcataggagcccacggtgtagtgcctgaaaagcttcttgctgcggtcagcgcgggtttctgtacagagagggaagagaaacaccattcagaaaagtcatggtccccgaacgcggaacccacagcacatgaggctggtgggccctctcacctactccccaaaatgtgagatgcactgtcctggggaagagtctggaggaaaatgaggcctggttctggggctcaactttgtgaaatttggggaatgcatgtgcacctcaatgctggctactgaagagtcaggagcactactccctaagggaggcagagtcccacaggcctcagctcacagaggaggcaggaggaagcagcctgcaaagatgagagggccaggccagctcagaccccaacagggcagcccgcttggctcatggaatccactagaacagcattctgccgtggtgctgctgagccttccagcaaaactgaaaacctgcagacaactgccatttgggaaagaaagaacatttattgtcattttcctgattatagttcctttctcctaaaaaaaaaaaaaagcaccaaacccacatgattaacatttctaattaagtcctctgcttgctccccttactcagcagattgagacataaatttcatgggaaatgatatgagtgatgtaattagatttaatggatagctcagtgctggagggagaaaaaaaacacacacacaacaaaaagacataaaacatagcagctcacgagttcctgtttactttcctcccaaacaggatttcctgcatgatctcctacctaagccctgcaaaacatccaaagaaattatgcaactgacttcaggaaaatggcccaaagtttaatctaaactctgtaaacaaccttctctgttgttagcctcctccatcccaaattctgaggtgaaatcattttttcttccactcaaaccccaaaatgcacatttgcagttcaaaagtaaataagggaattgagaaaggtctccacacctttcatgtgcccagaggcagccagctgttcaccaaaagcacatgttccaagaaccctttcccttttccagcagtgtggtgttgcccttgagggcaggaaaggaggcaggtgttgagcccaggactacatttcccagcctcccttgaacccagatgtggccacgtgactagttctcaccactgagatgtgagcacaagcagggtgggaagggtcccttccaagcttaggctttttagaagccagtgtgctctcccgactctgtcttcttgcttctgccagctcaacgctcaggcctctgagaccctggggtcaacagctgggtctctgtgccctggactcttacgtaagcaagagtttcatttctaccacattaggctgcagcctcggattaatttgacacagtggctaagtctttcacatggaagctcccagctgtctccaccccttccacactgctccccacaaacccccgaggctcctacaaaacacaacaggactccccaaacagccacatcatcaccatctccatcatcgtcactgacacttattgagcacttactctgtaccaggccctgctataaagtgttgcccgagtattcaatagtttaactgccatgaccacccagggagtggggcacactccacttcgcaggcccctccagtgcagccaggggcaccctctgccctccactccattgaatgccactcctcaaagccttgctcagggccgtgggagccctccttgtacaaccaaaaagacgcattgcacgattaccagataaaaacacagtatacacaatcagattggtcagagtgcacagggccctcaccaagccagcaccggtccagccaagctgcacacacctcccctttgcttggcatctgcaacaaatatgcccaggtgcaggaggacacctgtgcccccctcctccctggcatccagcatcttgcacaggtccaattccaatcatcatttatgaagtctgcctggcagccaggcccgtgcctcgactgcagggattagaagaattcagcagggcagggcctcaggatcccggggatggggcgaaggaggagccccagggtactgagcctccacaggctggatgaggggcccagcacgtgggtagctgtgaggtgggaacacatggtcaggcaatccctgtgacatttatgttgggccatgcatgtgcagggacaagtgagacttgcacctttccctagggttaaacagagtagctcacaatgccaatgaagggccacagggactggctgttaattgctattattacttttaattgtctctgctccttacaccctcatgtggcagctttgtgctggctgtctagggaactgctgggtgctaccagctgattggtgcaggatcctggctgaaatcggaggccggggccagaagcagagaggagtgtgtagtggaatgtgtgcgtgtgtgtgtacgcgtgtgtgtgtgtgtgtatttaccagaaaaaaagactatttcagtaaaggaaccatttctaggctaggtaaggtagccagtgtgtcccagactggagtttcatggaccaacaaaactttaaacaaagagaaaaagggtgtagactaacataacattcaccaagttttacatttggctcagtaaggatattaagaacagtaaattcccctctgatatcaaaattgtaagaaaaaggaatctttttttttcttttgagatggagtctcactctgtcatccaggctggagtgcagtggtgcgatctcagctcactgtaagctctgccttccaggtcacgccattctcatgcctcagcctcccgagtagctaggactacaggtgcgtgccaccacgcccagctaatttttatattttttttttcgtagagacggggtttcaccgtgttagccaggatggtctcaatctcctgacctcgtgatccacctgcctcggcctcccaaagtgctgggattacaggtgtgagccactgcacccggccagaaaaagaagcctttaaaaggacattatctctgactgcttcatgcaggaatccccctgcacaggccttccctgtctcctggttcccagaaacagttatacttgggctctgggatatggtccctaagggacaggaaagggaccctaagggacaagatcattatcaccatcaccactcccatcatcatcaccaccaccctccatcatcaccaccatcatcaccaccaccatcaccaccaccatcaccaccaccaccatcaccataattactgccatcatcaccatcatcatcaccactatcatcatcatcagcatcaccattaccatcatcatcaccaccaccaccatcttcttcaccatcattaccaacatcatcaccgccatcatcatcaccatcttcttcaccatcatcaccaccatcaccacatcatcaccaccatcttcttcaccatcatcaccaacatcatcaccataattactgccatcaccaccaccatcatcaccactatcatcatcatcattaccaccaccagcgcattcttcactatcatcaccaacatcatcaccaccatcatcatcatcaccaccatcttcttcaccatcatcacaatcaccatcatcaccatcatcatcaccaacaccatcaccaccaccatcaccatcatcaccaccaacaccaccaccatcatcaccaccatcctcttcaccatcatcatcatcaccaccatcaccaccaacatcatcaccaccatcatcactatcatcaccactaatcatcatcatgaccccatcaccatcatcagcaccaccatcctcttcttcaccagcatcatcactagcgtcatcaccaccatcatcaaccactatgaccgccacaatcatcttcttcaccatcatcattgccattatcactgtaatcattatcatcatcactgcagcagaagacacatttatctactgtcaagtgtggaatgctctgctaaattatctcatttcattaaaagtaagtctttacccttaattggtactcacacaatatcccaaagtaagcagatttcttgtccctggtttacagaagtagcagagtgcaatgataagggatgtgggctccaaggccaggctggctcgattcagaacccagctctgccacttactggctgcaagtcctcattatttcatctttaaaaggatgatgatagtaacagtccctccttaaaggggaaggattgaggaatcaatacatgtaaggcactagaatggtgcatggcatgttgaaagtgctatgtaatgttaactaatgctgtcgtggtcatacattagattagaaacctctgcctcccaaggtggcctctcaaggtcatggagtctgtcagcagcagtgtgggcctccgacctcagatctgtgcctccacaatcagtgctgacagcaaccaatggccatagttggtgatccacttaccaggggccacacgtattctaggtgtgtgtgcttcacctgtctgagctcagtaacgttgctgtgtctggtttacgggtgaggagggggaggctcacagagtttgagtgagtcacccagccaggaagtggcagagcccattgtggtgcagcctccgggggtagtacccatatagggctcctgggaggtggcatctcatgagcgacccgtgtaaatccaggtggtcttcttaactctgccacatcctgtggaggtgccctcagcagcctcggtttctaacctggaaaaagcggggtgggctagacggcccttgggaccctgcccccagtgttacagtgcacacctcatggcatgtccaggcttggccccctgggacttgctgtgcactgcgctgagaggcaagggctgctgggctgccccttcccaaggctccctggatctcactggtgaaaacgtgggtcacaaataaaacaccctgaggcagacgaggggaggagcaggaggtcaggggccacaccagcctccctgtgcaccagtgacaacaaaggatgctggctgtttcctgccgctgagaggtcagcttcccaggtgccggggcccgaggtcaattctgcctcagagctgaccacaccttcagccgcgcatgcacctgctcacctggctggccacatcctccctgtcttctgtgggaccagccctttctcagctccagccatgtggtcaggtgatgccaccctgccccctccccacctgactgcccagccctgggctcctgcagttcccatgggagcctggctggaatgtccctttgatcccagtgagtgacgggctcaggggaggggcctgggaccacagcggggacaatgccgccctactcctgctgctggggttcccacgcctcaggccacagagggaggccagcctcctgagggggatacccatgtgcaggatggcacagggctcgggaggaagaagggcaggaacagagacagagagacccagagagacgggcgactgccctagagacacagctggaaaccctggacacagccatgcctggcttctcacttgtacaaactaaatgcatatccttggtggtataaaaaaacttggctttctgttgtttacaatggaaagaactaggaatgatgcagtaatgcatttaatagttgtgctgctgcactgcgtggctaagaaactgccgtggctacatagcttctctggggacacagccgcttcccttccccatgggaaggtcctggtgaggctgaccctcaggaggccaagcagcccacccggcacacaggggtgcatatgtgggtgtggtctagggatcctgctggactctcctgggccctgtcattagcagtaagtgacccagggcccacttaaggacaggtggctttttttctgagatgttctgtagtctgactgctgagaaaggtgatcttggcttccttttagagatgcgatggaaggacacgggctatggccaccattcaaagcacagggagggagtgagtccagcaatgaagccagctcatggcggaagacagaaccaagttcaaggtctggggtcagggagagatggacacaaaagaccttgatgctaggagtccctggattgtggcttgtggtggtcactgaggctactaatcaaatacttctggctttccaccagggcgcatgtggtcagacactacttcttagctctcctgtggttgagtaggcccttgaaattaattttggccagtgaattttgagaggaagtgaattctgttatttcctggctggaggttttaattccaaatgcaagacccccacccaccagcattgtctttttgtccttgggcatggccaccaaaacatttgagaagctggtggttctattagtctgggtcctcaagtcaccccctgttgatgtatgatgggcataaggtgtgaatgagaaagaaacttttgttgttccaaaccacagagattggggaattttttattttttatttttttaaggctagtcaggtgaagcagtgggaatggagaaggaacaaacaaaatctgtaactggttgtgatcaatgagttgtaaacactgctgcactcagagcagccaaggggaatgcttgttactgcagcttcatatagggcaagctgactgatacacatctccatggccctcttagtcctgtgggccagtacatcctaggcagagatgggtttctgtcaccagcaaccaaaattgtcctagcaagtataggagggaagaccagacaaaatcaaggcaaaggctgagtttggcctcctctgagagaatggctgtactttctaggagaaaaggaaaaaaccacctactagacaatggaaatggatcccattaagcatggccagaacacagcatagcagcaggcactttatgtgtctcagaggagacccctctgcctgtgataaagaagccagggaagccaaccatccaagagggaagtattgacttgtctgcttccttaaccatggagaaacttcttgacgtcaaaaccaagcttccaaccaggccttcctcccagtcagtgctgggatcagtgcatcatatagcaagggctcagcaatgtttgtagtgctccacatacatggaggctagcagttactaccactctagtctgaaccaccatgatcttgcacctggactgttgcagcagcctcctgcctccttgcttccatgcttgcccttccctttactgatacacattctatagagacaatagaatgagcttttaaaaaatgtaaatcaggtgattttcaactctgctgcttaacgttttccaacagcttcccaatgcaaccagagtcacgttcaagctgccttctatggcacaagccagacaccacgtggccctgcctgctccctggctcatctcccaccgctcaccacgtggccctgcctgctccctggctcatctcccaccgctctcccctcctcggtccccccagccgtgttagcctcctctttgtctcttgaacaagtcgagctcattcacacctcagggcctttgtgtgtgcttaactctgcctggaacattccttccccagctcacatttcactgcaatgctagctctccagatcctacaacacagcctggtgcatagcgggcactcagtaactctggagaaagtgagcgaatgggtcaaagccacacacccttggaccctttgctcatattccaccgttggccacgtcatctccttgggtctgaatggggcaagttggagatacaggaagctggatgattacagctccagctggggattgccgaggcaggggacacagccctggctggggcagtggctggctgtgacctcctcactttgcatctctgggccttccccttctcagctgtgaagtgggccggtgggactaaacagctccttaggctcttgaacttgtcaacccgacacatccctctgggtgtaaggcgactcaccccatgtcccaggagagggccatcggtccagacacctcacacatgcagcatttgagcatgcagggcctgaaagctgttttctgagtatggcctagaaaaatctacactgaaaggaaaaaaaaaaaaggccaaacctagaaatcccacttaatataccttttgggactcacgagaggcagtgacagattgcatgacaagcttcagactgtcagcatttaaaatagacctttaagcagggctgctggaaagaggatgctgtacagcttggcaaggaagccaagatggagcatctggggagattccagtggcctctgatcctgcgctctgactgtttctggaaaaggaaataagaggatttttctcaaagaaatttactaagacactgaaaggccaaaagctaatctttaaggatgggttgggaggaggtgggctatagaactaagagatagaaggtggggcaaggtgtggtggctcacacctgtaatcctagtactttgggaggctgagatgggtggatcacctgagatcaggagttcaagaccagcctggtcaacacggcaaaaacccatctctactaaaaatataaaatttagctgggtgtggtggtaggcacctgtaatctcagctacttgggaggctgaggcaggagaatcgcctgaacccgagaggtggaggttgcagtgagccgagattgtgccattgcagttcagcctgggcgacagagtgaaaactccatctcaaaaaaaaaaaaaaaaaaaaaaaaagagagagagagatagaaggtgagaggtgaggacagggtcctgtgagcatgctgacctctacactccagccacattccatgggcagtggtcccctctgttcatgagacacacgtggacagacagaggcaggaaggatacacaacagtccatctttagacaagacaagctcgagcttaaatctctcgctagctacacaaccccaagcagcaaaccatctccctccaagcctcagttttctcaactgtgccctgggccaagagcagagtttacagggctgcactgaggacaagatgaatgcacacttctaaataaatcctttccccagcatccggcctggggaagccgtcgagtcacgttggctactgttgtctgtccaggaatccagcttggacgttctggtctacaagtctctctgaaaacatccccctgccctttgcagacaggaagctctgctccctgaccacctctgtaccacctcaccccacgccccagttacagagggctgggccatgagatggcacctgtgtcaagccaggccaatcatcagaacctcccctgggaatctggagtagatgtggacagtctgctcccggtgtgcaccgaggacatcacagctggggcgacaaggctgtcaccacacagcaccagtggagggaggcatgtgcttccagggcctcaggaggcagggccctgccttctgccctcgatgaccaggaaaagccctggcgtccctagaccaaggtccatttcttcatgcaacccagctcaggcaagctttgtatttcttgcaatgggaggagtgccatctttcagtctgtctgtcaagctgggtggaacctgttatacccaagacgtcatctcaggtcctggctcggtggcccatttctcccgatggactgccctggacactgcatttctcctgatggacggccctggacactgcatttctcccgatggactgccctggacactgcagggctttgggcatccttgcctccaatctctaaacattgggattcaagatgacaaccaagtaacgtcccctccacgtttccaatcagtccccgcactcccccaccacgagagccacatgccgcagacatttctgggttactttttgtcaaagggcagtgacaatgaccagacagagggcactgaacaggcaggggtcagatgtctcctgtgtccatgacaaagacagtgaggccccgaggtttggccaaggaccttaaggctgacttcaaatgaccacagagcacttccgggtcaggcagccttggatcgtctgccttggctgggagccgctcctccaagccctttgaggggtcccagatgataatatactgagctttttcattcttttccccaagtgctacgtcccaaatttacttttgtaaattgacaataagcacagatgccacgggagagtgggaagatgatgccatgcgtcctgaagaggggattgaaaggccttctgatgtgtggaccccccctgctgacctccagggcaggttttaaaatacacaagaagggcagggcgtggtggctcacacctataatcccagcactttgggaggccaaggtgggtggatggcttgaggctaggagttcaagaccagcctgaccaacatggcaaaaccccatctctacaaaaaatacacaaattagctgggcatggtggcatgtgcctataatcccagttacttgggaggctgaggtgggaggatcacttgagcctgggagtttgaggctacagtgagctgagatcacatcactgcaccacagcctgggtggcagagtgagaacctgtctcaaaacaaaacaaaacaaaacatactaagaattccgatgtaggcgaattctgaatgggacagttcaaaaggtgactgcagagagctgagtcacatcagctaaagccctgaacacacatgaacacgggcccaggagcctgggcaggttatttgactgtgtcctctgccacatggcaggaccttagctaatgctggctattgccaagtctcctgctgggaatagggagcaggggagaaccctgaaggttgaggtcaggtctgacctggctgaggaaggaggaggaagtctcagcagagatggggaaatatcatatgtcagctatagcttgacagagcctactcggtgaccacagccatcctgacatcccatgggtaaatgctcaggacaagccctagaaaaattctgtaggatgcccatttcacagacacggacactgaggcagagcatagttaagggaaggcttagcgcacacactcagtgttgggccgatggagcgtgtggccgtggcagagacagctggcaaaggtacgcaagtatcatgagatttggggttggggaagagacttgggggagccctggcgagcgagtccatgtgacggctgagcacagaggctggggagagaggagagaagaggagccagccgcaggcctcaggtcaccagtggggcgggtgggctccgggggtccagggtaggatgtcctcggagctgagtctatgctttcagggacggagggggacaggtggtgagaacggttcccacggagaagtaaaggaggatgaacactgagattccctggccgctggacttgaaattcagaggccaggaaagggtggggcagcagaagaggttttctaggcgctctcccagatcaaaacccaccaccacctttgcactgaaaacccctgtcctgagatgaacgcgattttagggctgctgagcgcctcctcagtggccgtgggaagacagggccttgacccctactggctctccccacacctgggggctgtgccgtcccctcaggcaggcctggctccctcttcacaacggcctaagagctgccgcacgacaagtgaccaggctctgaagtcaagggtgagcaaccactgcacacaacctttgacctgcagagaggactgtaggagactgtgtcccactgccccctctcggctatggaatggggtaggagggaagcttaaaacccaaggagggctgcagacaccctgctgaatgcggactgtgccggagcatatgaggccggcgagggaggcagaactgacaatgccccctagaccttcgccccctggcatcacccccacagtaatgtcagggttgatggtgaaagggggattatcaggtgggaccgaactaatctcatcatctcatgagccctttgaaagcaagtacttttctctggcgggtggcagaaggggaagtcggagagactagaagagttggggaggccagtcccatagactcagggagccaaatcctgcccacaacctgaatgtgaccagaggcagactcctccccgagcctgcagctaagggcccaggcctcagacccctccaccggagccctgtgagagcctgggcagagaacccagtccagctgcctgactttggactcacagagcctcggggtcgggggtgtgagcagacacgcctgtggtcacgggttctgcagcacaggaaacggagggaactggggctgcaggttccttcacagatcttttttttcttttcctgaagatttatctgcaatctcacccaagacagagattgaaaaagagagagagagagggagggagaggcatgtgggtgaagggaattcccagaacatcttcccttcttccctcccttgaaatccatcatcctctctgaactctcactcttcactcttcatcccaaagaggcaaaaatcacagcagtgggctctggggcggggtggggtccccaggacttccgtgtcatcctggttgtgattgctgagctcctgcaacgtgcagccttgagtccgctctggccacccttcctgccgtttagagggctcagggtcacccgggtggcaacgtggctgggctgtccagctccgaatccccccagtgctgcacccgaacgcctccctcccacgcagcctcctgccgtctccgcaggttttaaatcagacgccgctcaggctgtgcccaggctgctgagccaaaagcgggatcagaaccacaaggaggaagaaattactgatggggatgaaagaccgaaataacttttcttttttaaaaccaaagatgctgatgggctccttgcaaggcagaggaacacacaggcagcagtgccgcaggcaggaatgctaggagtgtgcggggcttggagccagcacgcccgcccggcctccaggctcaggactccactcttggggcccagtctctgctctggcaagctgttgggtatgggacccaccgcgagggggacagaagggcggggaccctggctctcagaactacccaactgagaggcacagagctttgatttgaaaagcaacacgtatcacaaaaatgccgccaactggctcggctcacttgttccttttctcaatcagcagcagatcattcatcaagcaccttctgggctcccgggactgaccttgcaggggaggggaagagaaaataaggaccctgtgcagaatgcccaggcacacgtcacagcacacggacctcgtggggatggtggcctgggctcctgcagctgccggcacagacgaccaggctcggtggcctcaaacaacacaaacgtctccccttacagagctgcaggctggaagtctgaccaggtctctgggctgaagttagggcgtttgtggagcttccttcctgctggaggctcctggagtgtgggggatccacttgcttcccccgcccggcttccagaggctgcggtgttcctcggatcctggccactgcctccaccttcaaagccagcaaaagcgggacaagtccttccccccactgcattgcatccctctgactctcagccctatgcctcctttcccacatttaaggacccttggggtcacactgaacccatccagataaccctcagctgacagcaacctgagttccctctccgacctccactccacgtgaccatgaggctgatgtattcagagcttctggacattaggacgtgaacatctctgggggccgctattgtgcccaccataaccacaaagagaccatccctgtcagacagcacagctgggcaggctgtgctctgaaaactgtttacctccccatcagcaacagagctcagaactttcaacaggacagaaactatgagggtggcagagaagcggcttccaggaaatgcacttccctgttcccagatacaaacaacactcagttccaattcggattctgccacttatggtgagccctagggcggggcccagttcctggagactcctcctgcaatgggtgggcgtggccctcactcagactgagccgccagcacgatggttcctcgctcggctaaaagcgcccagctctgcaccaacagcccttttcctggtctgcaccacatgctcagggggccacgctccccttcctggaatcacactggtttccagtagtggaagctgcctatctgctggaattcagcaccaacaagcacccgagtccatagttccacttgttcccagctccctggaagatcgtggttcctcccatgtgcgcacatgtgtatggcgtgtgtcatccgccctgctcctctttgctcgatgctgggaagaacagcctcgtgtcacacgcctgggtaagaccccagcagcgaggtgcaggggaagtttgccaaaagaatcacgtgctttgaattcccttaacattggcatgggtttgtgtgtgggcaggggaggcaccagccctgtcgggcacgtgccagtgggtcctcagcactctgacaccacacaagggccagatctatggactccaaatccaggggccaaggaagcaggtgccagcatgctgggctgtgtttccatcctccaataaacagaaatcacttcagagagccggctccgtctgctcctggcacagttggtttttcttagtcatctcaggaaattgttggttgtactgcaagatgagtgaagcaccttaagaagaacacgggttacagtactgacttgccactttacgaagcagtctttttgccaagcgtagctgtgtccgctttcacagaacccccgtagcagcagggcttgggcgtggagcagccaaggcccacgtagcagtggcttcatgtacggagccgagggggaggctcacaggttggctgagggtgtccagcaaggcagtggctcagttgcatgttccactgatcatcggaaagccagggtgaggtgtcagcctccaagagtctgaggaagagaatgggagggagatgcctccaggcggcagagctgtcacagcgccgggtgtccgtcacagcaccgggtgtccgtcacagcgccgggtgtccattgctgccaccatgtgatcttgatctgtccttttccaccatccgtcatgccttgccgtgtgccacacacaccatttaagtgtaaaacacactctcttctgaatgctcccagcaacactacaagaaaagtgctagcagcgttggcctctgctgtacaggtgaagaagctcaggtgcacaccagcgatctgtgccagtgtccaagctctgggcactgccttgtggccatgctaagtgccttcttccttccaacaaactgctttggctcactcaacagctatttgcaagcagcagctcctccctctaccccaggggccaggaagctcagcgcttctcccagcctccctccaggagtgcctaggtcctggccaatgagacaggagcaggcgcctgccaggaggggcttcctttccccaaaccaaacctccccagagcctgaagcttttcagcccttccttcttccctgtctggaatgtggaagtggctctacatctatgctgcccccagagcatgctgaggacacggaggagaaggagagaaagagccacatgcccagatcaccgtggcgcagctatgcccacctggcccctgcagcctggcccctgatgtctgttgggtgagatgagtaaagccctgtgtgtttaggcaacggtttctgtttctcccagccaggcagggtcctaactgcaaggccttatcttgtttagccacaaagagccccatgagacaggcactgtcattataataatcacttatcagatgtggaaatcgaggcaccggaaggttaaatggtattcctctataacacaatcagcaactgatggagctggtgattacattaatatcttaacatttctgcagtattgcacacagagactccacgagaggactcgacccaggagaaaatcaggtgtgatctgatcatttccaaggtcacctggctgctgaacatcagagctgggatccaaacccaggtcctcctggctctgagagtcaaggtcaccccatggcctctggctacatcctccctacggcatttttcttccttccttttttttttcttttgcaaaagattggttttacctgtagcatttctgtcttataagagacagaatcttgttctattgcccaggctggagtacagcagtgcaatcatagctcactgcagccttgaacttctgggctcaagcaatcctcctgcctcagcctcccgagtagctgaaactataggtgtgcaccaccacacttggctttttttttttttactttctgtagagatgaggtctatgttgcccaggctggtcttgaactcctggcctcaagcaatccccccacctcagcctcccaaagcactgggattacaggcatgaggcaccacacccagccccacctataacatttttgaaaggataaatctcagaggtgagtggtgccctgtagataatattttttacaatgctacacttgagaattatccgggaatgtgggaaaaacctggaatcctaggttcttggaggaaggaccctcattggagaatgggacgggctgtgcccagggtcacccagccgggaagggaggatgctcagctctgccctgctgccctcccgccactgggctcctttgcctgctttgtaagctcagtggatgcctcccaccctgggcacccagtgcctatggggagggcagtgtggacttctcttttgcccacactagcccttcttgcagctctcgggccaagccaggctggggacaccgtaggaggggaggctacactcagtctctggtgatgcttcccaattaccaccctcccaaattggctggacaaatgaatcaagctgttggctgtcactgagttggtttctactctatagtaattagaatgttttaaaaaaaatcagcccaggagctcagtggaagcatgtataccaatacatcgagccaaactcacagtttaaatggaaattagagtaaatggatgaatctgtgcctgatttgcatttgctgatgagctcggctgggagtgtccatgccgaagcaggctccgtttccagaatggctctctctcctctatctgtccagaaggatgcctggcgaatgtgacccacatgcccctggacccggcagcccagggctggagtcgccagtggggaggaggggtggggtattgtggccagactccaaaagacttgtccacggctgagctaatccggcctgggcccagaggggagcagagcctgcctctggctgtggacagggcgtctggaggggcctcactctgtgtacccctgccccctatgcctgcccctccaacacccactgcctaaccccaaaactgtcttagggctctgccccccatgcctgcccctccaacacccgctgcctaaccccacagaacatcctgtcttagggccctctttgtggtcggcctctttccccggccaatcagagcacctcgaagaaggccgatgataatcagagccaccattctcagagcaaacaccccaagcatctcctggcacgaggtgctcaacactgctcccggccaggctttgttacccccaagagagggcccaggagggggccatgtccaagggcacgcagcagagcctggatttaaatctaggaatgggtgggggcgggaggattctttttagctttataatcttttttaaggatgccggcagctgaggcttcggaaataggacatctagaaaaaagacctgttgagctcaaggaaaccgccctgatcgtgtgggaagacagctgcttctttattgctcgggtttcggtgctgggaccttggccaaccgaagttcttggtcaaggggacccatctccatcagggtgccttcttggggaggatgaggtgggtcccactggtgctaacaaagaccacccgccctccgcccctggccgtgaccttagcaagccagggccagatgctcagggctcattccctgccactcaccaacacggggcacccccaaaagattctacacgtcgctgacaaaacccagagttgccaggcgggtgaagaccagcggggagactgggcaggggtcaccgtagtctcgacagctcatggctcacatagatctcttcaaccgcaaagcaacatctgggagggatgctcctcggtggcaggcgcctcacatctcactggaccgggtcccggagccccccccccgcccaactggacccctcccagcctggccattcctgctctcctcggcctttgtgggcaagagggagcagttggtgagaagctactggagaagctgatataaaccattatgcagcctgcaaacgcacagggtgtttctccctctccaccgttaccacgcggaaggagcacaccgtccacttggttaaaacaacaacggaaatccacccagccatgctgtctttggagaaaggcaggctgcactcgggagcaggcacgctgccccaggccagccttgcagggactttcaatacagtttgtcgggttaggaaagaacacgccagaaaatgaacaagccacatctgtagccacagcacctcatcatgcaaccgacctccctttgaggttaaccacagtgcttactaggaagagatgtatgaatttgtcttaaaaacccactagccgctcaaagggacccttgagactataaacaggatccctgggattctggatgcaactgagaagcctgtttcctcccgaatgatctgaggctatatctttatttccattctaaatcagaagcaggcgaaagccgtgatggaaacaatagcctcggggcgcccagcaagcaggacacagtccccctaaaacacaccaagtgcaaagccattgccaccccgtctcaccaagcgccggcaggactgcccaagtcccacggtcctcccgtccccgcagctctcgtaaagaacaaaggctccgcacaccagcccacagcgtacctccaaaatgaactttcttcttgaaccgtgaattctcggccatcctttctaacctgggtgtgaccatctcactcggaccactgctcctcggggtctccacggagactgagtccgtggggcggcctcatctactactgcctgttaattcaacaggaaaaaaaaaaagttgcagccctctgggggcagaattgaagaagaaaagaaaaaaaaaatcagatgaagaagaaagatggctccgggaatgtttcatccatgaggaagttcacaaatttgacttctggggactgaacatccaaatcagctgaaaattcgcttctttgacacaagttgtaagccccagactggagccgcgtccttccacttcccactgtaccagggacttttttttcccctagtgccagtttccatggcaatgcatcagtcactagtctaaataagtacgggtgaaggacgcctgaaaaaccagtgcaattacgcatgccattagcagggagaggcagtgattcaacccggctattaggatgggccggaggtgtcacttagaggcggcagctgtcctcgtccccagtaattgctttctcattttgcaaggcttggtgtttcctcggtcttggccgttcagagccctgctttctgtgaaggggcagccgggcagccaagcccgttttggctacacagacgccctgagcctacgctggagggaaggaactgcgcctcggtggaggtggccctggcccaaggcgtgcactgtgccttcctctgggcagtgggtccttagcggggcttggggcatcaggaggcaaggagggatttggggaaaaatccatggacatgctgcagattccatctgcaaggtcacggccagcagtccaccctgcatcagggtcagggcacagggctgggggctgagcctccttccaaatacctgcaaggacttctcggctttcaaatacttcccaatcggtacgtcccgtgagaaggcgaatgtcacagcagggcagggagggagtgctcctccctttttgatagagctcattctctttttttttttttgaattgctggcctgaatgtccatcatggcccgggacagaagccctcaccttcctgagctgcaggctttcagtgggttagaaaacggattagaaggggttggggatactcaatggatgtccttcatccccctggagaggcagagtgtatggcagggaggcagcctggactgaatcccactttgccggtcactggcgctatgagcttgggcttgtttccagttatcttgatttgtcagctggggataatcacgaattatcggtaagatggaaatcagggtcatgagaatacaatgaattaaagaagggtgcctggcatacagtaggcacgcaaggaagatcagctttgttcctgttcttacgttcactgcccatgtgaagagcacgtcaggtgccatcacctgcaagctcgccgtggcgcagtgaacgctgcctggggttccagatagcgtggggtgtaactcactcctttgattcccgttagcccacccacgttggaatagacactttgtgacggttcaaatagacactttgtaacagttcaaagatgagaagcgtggacctggagaaggttagcgactggctcaaagtcacacagccaggtaagggtggacttggggctagaacccagcgctgtgcccacccactatccatgcctgctgccccagcactcctggggacatggacgtcatggtgctgtgtgcatgggcacccagtgggttgctggggatgaggatggagctgggcttcactctcatgggtggcctggcagatgctgaacctaaccctaatcctgcccgcatgcagcatggtggaggggtgcagaaccctgacctacgtgggatcctggtttctgtggccctttccttctgcccgtggtctgatgtgatctatgggcaaatcggagggtcataaaaatagccctacctggcacgccaggggcccagggggctgctgctgctcactgggatttcagtgggaggcagaagctgcggagacaggaggtaaaaatagcaagggtttccacaacagccccgcgctcccctgctccagcatttgacacggcagcacacgagatcctcttgtcccactgcgctggaatcttaaaggttcctgtccttggagacaccctatcttgccaggaaaatgaggagctcgcagctgcacacagcagaggctccaccttccctgaagtccttaaatcccccacatcaggctgactaggaaggccagaagtgggtgagggctgagcttcaaagcaaaagggttggtcccttcccagtgggtgaccccaggcaggttcctcaacctctctgagattcagcttctgcatcaagaataagcaggcagaccagaacagctcctgctggaaggcagagccagaaccatcggaccgctggaaccagctccatgagggcagggtccacgttgcccctggacacagctgcacccccagggcctggtacctgggagatgcccataaacaccgactacctgcacacacgtgcttataaactgtagagtactgtacaaagtgccacggtcatttctgatgtaggggtcatcacctcgtctaactggtttatcacaaaatggatgtgatccagggacatctccagaggctacagagaatgagcctggggtctggtgtccacagcccccgcctgtcaatctgctccctgatgccatgggtgatgggactggaggaatgtccctggcattcttggccctgtgactccttcgttggtgaaaaagtggggatggagaaagtgccagctcccagggggccatgaggagaacccatgagggtgtgtggaaagtgtctcagttgaaatccactcatccgtcacacccccatggcagggaggccctaagaggtccccaggagggagggctggagatagagttgtttacgctgttcttggcccaacaccagtctctaattacccagaaacatgcaggaatgacaggtgggactgatagctgtgtgttcttgcggtatacatgtgctgacacacgtgaacacgcatgtgaacatacacacacacattcatgtagcacaccggcatgcacaatgcacacgtgtgcatgcacatatatacacacatgctcacatacatgcaaacacatcttcacacacacgtacatgtatgcacacccatgcatgcacacatacacatctgtacacacatgttggggaggaacagaggagagactgggaattgggaattcttttctttggaaaaataatctcaaggctttctttccctctggaacccaaaggagtccagtcctcattcccccagtgacctgagcccgggcttccgtgtgccaggcaggcctgaggtgagatccctgactgaccggcagtccgggcaccttctctctgtgcccctccctttcctccagttaacacctggacatctctccaccgacgtctagggagacaaaggtctccctggcacgctctgctgctccttcccgaaagaggcaagcagctcttgagtttcatttcaggcgcatcacacctagtggggctgtgagggtttccctcagggactgcagccgctcctgggcacactctgaggcttcctccgcagtgtctcacatgggcatgcctgaaggtcggttctcaatgaactcttgcccatttggatttaatacatgagtcaggattaaatgcaggggtcagagatgccaacatcttggggcaggccgtgtgtacaggagctggtgctccaccacagggaattgtaggggctgggctccactgaatattggaggtgtgtacaccccactgttggggaaggcctgttctttctgaggccagctgtgagtggggctgggctcagggcaccactttgtgagcagcgttcttactgaggcagttctgcccccagggtgtggtctggaggttcgtgggccagctagtgctgtcccagtgctggggaggtaccactggcatgccacaggcagggctgggatgtgggaccgtcagcagccagttaccctgcatgcaggacttccaaaggtcccacccaaccctagacaggtgcagtgtcttttcctaaccatctgagctcagagcctaaactcttttcgcaagaagcacagcgtgttttgagcacggcttgaatacatacaattcttcaggaatgccaatgacttcaacatcaagggaagaatgtcctttgtttagctgaggctttgaaagaactgctcaccaattcccccaaatgatgccactggtggcagggcccgtcgaggtgtgagtgcacctcatgtggcactcaaggtgactgcaggatcatccatcccatcctttgttttcccgtccagtggcacccaagtgcatggatctggaaatcatcttcccgctttgtcatgccatcctctcctctgtcctcactgtcactgctgggatgtgtgctgtctcttggtactcagccccattcctgcccttcagtgctctcaggggctaagtatgcacactgcatttcccactctcttgccagggcagcagtcaggctctgctgatgggaggcatttgtgcaaagttggccttagtggctggcacaggtggccactgaggaatgtcaataggatgctcctcacgctctcagcaatacctcttggttctttttactcctgtaaccctaagggacatgaaggcttcctgcagtgaccaatctctgggtgacatcacctgtccctttctgctcctccagcctttccaacagttttggaaacaatttcctgattcaatcccctctgtttgaaatacctacataggcgattgttttttctgactgcatggattcataaaaggtattagcttgagttttttgaaattacgtatattgttaattttattctataagaatttcatttaaagataacaaggggaatccttgcacatcattgtttgaaaaaatgggtgcaatgtgtctattagaggtgagaaccacagagcaaaaatgagagatggtttcttaaagggttgaggatggtggagctaggaataaaggtcaaaaccactacctcctaacatagtgtacctcgaaggctgctggtgacttaacctggagacttattaaaagaatctcttagcttaaaagcaggacttacgacttatgagaagtggcaggagaataatgtgctcagaaagattctaagcctcctgaaaaagagggttttgaaataaccaaatgctttcaaaagaaacctactttgttagataaaaatctcactgttaataatgaataagcctcagttttaacttttctgcctggtccctcatctccttacctttatgggacttttttacaaagcaccgtcagaccccatgtggggctagaaatatgctcatggtccttgtggtagacaaactcataaggtggccctggattctaccttctggtcttcaggccctgatgtgattctctcccaatgagcatgggttgggtctcagacttgcttcttccaagtagaatacagcaaaggggacaagatatacatgacttcatgcacatgattataggattatacgattatattagatagtagcaattttcttgctggagggtctgtctctctctctctctctctctctctctctcgctggcctgatgaagcaagcagttgccttggggaaccccatctagcaaggagacacaggtggcctctggttgctgagagcagtctccagcccccagccagcaatgaagcccttactgataaaaatacaaggaactgaatttctgccaacaacctgtgagagcttggaagtggacccttccccattgaacctccagatgagaatgcagcccaactcacaggctgagtgaagccttgcagaaggctcagctaaagcatgcctctctcctaacccaaagacaccatgagagagtaaatgcatgttgttggagccactgattttatggtaatattgtcatgcagcaacaggtgactaatcaagtcccacactgtttagacttatgagccatgccatatagccttacttggtgtaacactataaaatactctatgggtgaaactgtctctcctagacctgaggaagaggatgtagagaggcaatatgggagaagcaaactgaagaaagaaacaagagcaggtgtcctcaaatagtaatgaagcagctccaaggagccagcactctcctaggtgctcttctgagtactctagggacagaaataagagcagttccttttcacagctcaagaccttgccaaatccacttaaaaaaaaaaatcccgcatcaaaccctgactcctcaagaggtgtgttctggaggccccaaagttcattcttttttttttttttgagatggagtctcactctgttgcccaggctggagtgcagtggcatgatcttggttcaatgcaacctctgccttgtgggttccagcaattctcctgcctcatcctcctgagtacctgggattacaggtgcacaccaccactcccagctaatttttgtatttttagtagagacagggtttcaccatgttggccaggctggtctcgatctcctgacctcaaatgatccacctgcctcagcctcccaaagtgctgggattacagaaatgagccaccgtgcctggctcaaagttcattcttacactttgctcagttaaggaagaaccatctgtgcagcaggttttgttgtggtggtggggtgtgtgtgtatgcatgtgcctgtggccataggtgtaaaaatgtctccaagcactattgctgtcagaggactccatgtcactaagcatcctgctaagagcactgtgagctcttctgggtcttttctgagtcatcctctcctcctttgatctcatcaagcatggtatccttttggaaatatcagacagcatccaatttagaggatgcaagaggtccagaattcccgagctgggaggcttagaagagttgtggtgaccaggtgactgccgccaaccacgtcctgtggagagctgtgtcgacacctgcagccaggctctctgggcagccttgtgtccaaacaccagctcagaggcagcaggaagacgctaactctgcgttccggaaatgtcacctgctcagtgtttgggaagggaaacctctcaagatctaacggggtgatcaggtagcagactctagtcagaagaagcaacttgcagctgatgcccatacaccctacaggggaggagacatttgagatgggtgagataagaaaagtcctcaaggtagttaaaaccagtcccaaccaaatgtcggtctaaaaggaaggaaaccaacatttgctaaatgcctactatgtgccataagctttcacaggtaagaaaagattttttaaagtatgttttaaaaaaggaatattccaaagcttgattctttgggggggaaaacacttaagctaaggccattataagactatctttagcgtaaataacatgggcaaaaataagcaccgtacagtgtactaaagggagggatgtttttctactgtgtggaattttagtgagtaaatgtttccctacaatattcataaatgccactaacaccccaaagcagcaacatttaacttatttgcagctggttctgtgtcatatttaaaatgaatcatttttcaacatttgcggactcttaaaagctgagcgtggcaggaggaatttccttgggtactgggacaggaaggcacatggcgctgagggcttgccagggtgcggtggcccagacccgctcctcccaaagggcctggggcctttgacagctgcatgtcagctgcaactgctggctggagcccgaggctaatgaggtcagagcaagggcctggtgcccaaagaggctcactatggaccgagtcacttggaccagtgggtgttgttcagatgaacctcaccccaataccgcacgatcccaagaggatgcgaggagaaaagatgcatccatatcaacacagaaacactgctatccacagcaacactgagaatgtcatttatcaaaggcccacttcttgtcagcacattgtcggtaactctacgtattttattccctgtcttcatggatgacccggtagacctctgaagacaactgaaagatggtgtacaatgaatgaaaaaatgtgtacagaagcatggggggaagaacagccaccttctaagctgcatcatctctgttcctcacaaatacctagacaaagcaaggcagacgtgttgttctaactgctctgcctgacagtccataaaaacatgtcgaagcagctggatgcccaggagggtatgcgtgaactcacacacacaggcagtggagggacagagctcaactcggagcaccagctctctcctccatgtaagcttctccatgctcagctgagtttctcagagctgtacttggtaagtgcattgaggacttttacacctacttccccgctttagggatgggtgcctctttttcagtgaaatcttacccggaacctaacacagaagcagcgagtacagaggccctgccccctcacctcccaccagcatcttggagggacctgagctccctggggctgggtttggaagctggggataaagagctcttgcctgtctgtaccaaaagcaggaagtgcagaggtctggccactaaaaggagcaccagaaacctctggtcaaggtgcactttgttaattcaccaatgccttatggagctcacatgccaggctctggtcaggaggctagagatgtggggtctttgccctgaagctgttctgagtctggtgtgggtgggtggggtgggcagataaattagacccccttgggatcagggctggaacggaggtggacaaagctggtggaagccaaaaggcaggggcaagtgtctctgtctgtggagatcaaagattttcagagagggagaaagtaagctcatttgggaaggcaggtgggggttggctgtggtagatggcaacaagacctaaaattattcccctccctgaacctacacccgtatgcgatatgactttgcagctcctcttatcaagagacaaagcctgtctgcccagaccttaaacttggtctggtcctgtgatactggccaatagcatgtggtgcaattgaccagttctgagtctagactccaaaaggcctcatgtgcttctgctcacccctggaaggctgtacagctgccatgtcagtaagcctgggctagcccactaaaggatgagacccagatgccctggtcatccctgccaacttgctgagagctcaccaactgccactacagacacaaatggaaatctacctgggaacagaagaccctccctgcagaacccaccctaatttgacttacagaatcatgagacaaatgacggttgttttaagccactaacttttgggataatttgttatgcagcaacagctgactaatacattatgactctgggcaagccacttgataatttagcaacagttttaccatctacaaaatggagatgacaaatcttgcctctggcacggagcagttgtgagagtcacatgggaaactatgtaaaaatgcattgcgaattttaaagtgcaaggtagccggggtggaagtattactattagaataacctggaagacaaaatgtgggaggttggccaatacttcacatatgaactgctatatttggggtctttctccagagacagcagaattccctgaggggttccttcggggatgccaagtctccactgactcttgtgtagtttccagggctttctggcaactaaggtggtaggtaatttgttccctgatgtaagaggcaccatggtagagcaggggtatcctaggagctggcatcccaggcaaggtgttggtattctggccctattgctttgtagcttacgctctaagctaagactgttcctcttgctaggtggtttctttgtgggtaaatggatgctgctacccctgctctgcattccacatggggcaggcatacggtaaaaatgaggtggcccatgtcaaaaattggtaccaccctgggttaagactcaggatagaggacctcccaaggtcccgggttgggggccccagccctacccgcaagcattcagatggtgtggtcagcaacacagcctctgttcccccaagacgctggatgggggccatgggctgtcctcagtttctgtgcacaaacatttacatcaacaaaagaaaacttccagagcagtaagtaattttcctcaagggacaaaggaggcgagaggtgttctgatgagttttgttggctgacatttttcagaagttatttacgggctcagcaaaggcatttattgtgtttagtgttctatgctataaatgctttggaaaaggagagtaaatgaatatgcaagcacccagtgtcagggcaagaacaggcaggtgtatgcggagcctacagcttccctggcggctccctgttgactgtcaccatagaaaccgagccatggggttaaaccgactcccaaagggcagtgcttggttaggaacacagggaaaagtactccccagttggaatccaacaaatgagagtgtcccacacctccccagatgcagatgggtccttgtgggatccaaagaggatccctctgggatatgtgagaagggacagaggtttgtctgcagccagaggccggatccgaggcaccgtgacttgggagtggtcacactcggtttacttggtagaaggcagcccccttactgccaatataactcaagacagcctggcagctggactggttcatcacgcagactcaggaagcgtcctgggcggaagcaaagtcatcccagggcttcaaggagccccagatgaaagccacaggtccagagcttctgagtggaacggggctgggctttttgagtccgatggacagagataatggattcttacccaaacaacacatcttcctggaaacaaacaaggcacaaacaaatacgcacgcccagaacactgaccatgggtggtctttcttctgcccaaggtgctgtttgaattactgtgttacccccaattcaggtttgctttaaagaaaaacaaaaaaccagttccaaacactttcagtgacactcacaccttctcctacgcatgccctctgatcacgtaaggaggcctgcagctaaacatacccataaggggttcaagaaaatgatcctcccagtgggagatggtgcagcacggactgactggtgttggcacctgagaaggaatgaagggccgggcgtggtggctcatgcctgtaatcctagcactttgggaggccgaggtgggtggatcacctgagctcaggagttcgagaccagcctggccaacatagcaaaaccctgtctctactaaaagtacaaaattagctgggtgtggtggcgggtgcttgtaatcccagctacttgggaagctgaggcaggagaatcacttggacccaggaggcagaggttgccgagatcgcaccactgcactccagcctgggtaacagagcaagaattcatctaaaaaaaaattaaaaaaaaaaaaagaagaaagaaagaaatactgatacacgtggcaacacagatgcgtctcaggaacttcctgctcagtgaatgaagccagacaccaagggctctatctacacatgtccagatacacatgtccacagaggcagaaaacagactggtgggctccagggactgggggctgggggaaatagggaggaagtaactgcttcatgggcacggggcttccttttgggatctaaaagtattctggagtgagcgagagagaggtggctgttgtacatacctgtgaatgtactcatgccactgcactgtgtactttcttcattttttttttttttttgagatggagtctcactctgttgcccaggctggagtgcagtggtgcgatctcggctcactgcaagctccgcctcccaggttcacgccattctcctgcttcagcctcccgagtagctgggactacaggtgcccgctaccacacccggctaatttttttttgtatttttttttttagtagagacggggtttcaccatgttagccaggatggtctcgatcttctgacctcatgatctgcctgcctcagcctcccaaagtgctgggattacaggcttgagccaccgtgcttggcctgcactgtgtactttaaaaatggggatagttctggcgtttgagaatgatatctcaacaaagtgttactaaaaaaaaaaaaaaaaagccgataggtgcctgagccaggtggtctaagtcccaaacctgctccaccacctaggggttcatgatgtggggcaagcaaaaccgcctctccctgcctcggttttctcctttgtcatgatacctaccattgcagatgtgtcgggcctggatgtgtcaatgcacgtgaagctcttagaagggccttggagaggaggaagtgggacctgtgtgccagctgctattatgtgtttcaatcttatcatcaatgctatttgcagcatgaggccccaggagctggcacaggtgaatctccttctgtggagttccccgagctctttgaagcaggatgtgtacattggttcaacgaacacctagactgtgagttcctggcctgtcagttccttgccttctccactcctgcccttgcacctgcctagtgcaacaggccctgagattgcaacctccccactcacgcccaattgtccccatgatctcatcacaaatagatgcccaggactcacccccgaagcccatccctataaagctgtgcacacccctaactggactgcatctcacccgactatcccagactcaaccccaatgcccacccctgtaacgctgagtgtgcccctaactggaccgcatctcccagcccttccagcactgtcctcagagctgcctgatgagctgatgtctcctcacatccattcctaccctgggcacctggtccctgcagatgagcagccaggctcctggccaggccagcatctcctcctctccctgctgaaggatgaggctgctgcggcagggccaccaactcccaaatcatccaagacatcttctctggactccatgtcttcatttcagcaactttccttcccaaagtggcgtctgctcactgctatgcctgggacctctcttttttatttcttttttttttttttttttgtaatttaggtgaaatttacaaaactgaatactaatcattaaaaaaatacaatttgttggcagttaacacatccacaatgctgtgcaaccagcacttttatctagttccagaacatttaaatcacccaaaaagaaaatctcatacccatgaagcagtcactccatgttatggactaacctgtgtgcccgcaacacacatatgttgaagccccaacgcctaatttgactgtatttggagatgggacctttaaggagataactaaggttaaatgaggttgtaaaggtggggtcctgatccttaggattagagtccttataagaagagaaagaaacacctgtgcaccttcttgctctcagcacacacagagaaagactatgtggggacacagtaagaaggtggccgtctgcaagccaaggagcgaggcctcactggggactgaatttgatggcacctcggcctatgacttccagcctccagaacagtgaaaaagtaagtgtctgttgtttaagcaacagtctgtggcattttgttatgaaagtccaggctgactgacatactccccgctccttctcccccatctcctggcaaccactcatctactttctgtttctacggatttgctaattctgggcatttcacagaaatggaatcacacagtacacaatgtgtggccttttgtgtctgacttcttttactcagcatcctgtttcccacactcatgtgtgctgtgtcagtccctcattccttttaagggctgaataatattccattcactggacagaccacagtctgtccatccatccacctgctggtgggcatctgggctgcttctgctttctggctattatggatagtgctgctgtgaacatctgtgcacagggacttgtctggacacctgtttttaattctctggggctctcttctttcttgagccctcaaaaccagattcacaccagctaccagcaaggtgcctgtggcctccacgctgcgaggtggaacggctgatgagcagccctcgtctcagctgacacagccgcctcctcctcctgcacgtgctctgccgggctggggtgtggccaggctctccagatgtcccctttctcacttcctggatgctcctggccactcctgtggcctcctcctcagctccccatcctctgaacgcagtcctctgtgtcttcctctctggccacacacacccccagggtgacctgctcaagtcttggcttcagatgccatcagactcctgtggccccagcctcaccctccagcccaacccatgcaggctccaccctgacacactacaggctgctcaaatgtaactcgcccaacatcacacgtaacatcaccccatctctgccctggcgcctcatccagttgctgaagccgcaagcctcgcctctgctctcaccctccacagccaatcagacagcaagtgcctgcaggtcacagacaactccggacccttcttgctgcccattcacaatctctgctctggcctgagccaccttcctctctctcctgggccctgtgcctggctctggaccagtctccccacttctctactgctctgtcctttctccacctggccccaaagccatccttagaaagccgaacccatcacatctcttgcctgctcagacccttgcatggcccaggatttttttctgtgtcccccagcctcactgagctgggctcagcctatgtgaccacacctccccgaccctcccctccctagaagctacagccgcgctgcccttcttgctgttccccaagcacaagtccattcccgccatggggcctttgcacctgctgttcctgctgcctgcagtgccccagcccatgcccacgcagcccatgcccttgcttctgtccggtctctgctgacacatcccacctctaggtggccatttttgtcctgcctaggaagcctgccctcccctctccagcactccccagccctgcagctgcttcacatccccagcagctgccatttccctgcaggggacaggcctgccggctctgtgagggcagggactctctgttttgcttccggctgtaaccccagctctggaaatggtgtctggcacacacagcccgcgcgaatagtgctctgtggaatgaatgaattctaagcttctcctgcatgtcagatgctgccgatggagtgatgactaagcagtggcgagggcacaggctgggcggggtgggagagacagacgcggagcagatcatctcaactgagtgggatcgtccgcgacagaaagacgtgtcacatgctaccggagccactgagagtgccgggagaggactttgcttgaagcgtggagaggagggactgtcacagctgggttttgcaggatgagtaggagttgggtagatggacatgtgagggaagggcatcccaggaaggaggaagaacataagcaaaggcccagaggtgtgaaaaagtttagtatgtttacacagaagcaaggagttgattcatattaacaatttatgtgtgatacagaatgtctcattcaatgcacatattagccctgtgtggtgggtacagtgatcatcgccattttaggatctgaaaaaagaatgtgagaggctccatccctttctggaggcttcacagctatgggtgactgagctgggattggaacccagggctgctgcctgcttttgtcaataaagttttattggcatgctgccactccattcatgggggtactgtctgtggctgctgcctgctacaaaggcagagctgagaggctgccacagggagcacatggctccaaaggctaaaatatttactctctggcctttacggataaactctgtggacccctggcctaggtcatggagaggggggtggcaggtaagttagggtgggccgtgccccactagaagagggacccgggaaggagggcctggcaggtctggggaagagggaggcccaagaagaggggcaggctcagctcccatgaggtgtctgtgcaggcacagggaacggtgaggacagggactcagctgccaaggcggggagggtgaccccccaagcacttgctacccctgggtgcctttgctaggcccacctcgtgcctggccaaggtgggacctggagacaaagcgaagccatggctctgtgtacttgctcgcgcactcacacactcatggaagacaggggagggtgtgcagtgactggggagaggggaagagtcaccaggggctgggaggtccctggcagcagggagggggcaggaggcaccccctgagccgcgcatctgggaggagcaggtggagtatgcagagcagagcccgcgggagggagtgccgggcagcaggtgcggcaggggcaagggtgtggaggcccttccagggcaccgtgacgggggaactggctatgcgaggagatgttttaactgggttgttcgagaatgttttgcctgatgcttctgagcagggattgaacgggcagaatagttaaaacccgagggaggtcgagtgaaggtgtgtgaaggtgacttcaaaggtgaggcgcatttcatgatgagcgtgagggcgccagtgggccgcctgactcccatacccagtccacacgctccacactgacagctcagggtgcctgtagctgggctggcaaaattcagccaggcttcaccaaccacaggcagagtccaggagcccagcggacacagagccctcctgctgtgtgcttcaaaggatccaatgggcgaggaccaaggggtggggtggggaggacacaggcccagccagggccccccgaccaataccaactctcctcccagccagaggctgccctggcccaggctttcagcaggggccccacagcctgtgccctggaggccaaggggtgtcctcaagaccgaagggtgctgaggggtggcctggggaccagccagtgttacatagccacaggaatggctgctggccccgagggcctacccagcaaccacctgagcgatgaggacccttggggacggccctcctgccaccaccctcccccaggcttgggaaggaaagagaaattctgccaagaacagagtacaaggcccatgaagctgggaatggcaggatattttaagcagtacaagggggattctgggttgccctggagacgagcgggcccaggcctcggcggctgtagcacatctgtgctctgtgaggccagtcccgtgtctgggctcaggggcgaaggggacccctccatcgcggggtcagtgtgggaaggtgggcgaggccgtggcctccccccaggtgggcaggttttcgggactctgcccaatctgtcagggaacccactgccctgtgttcaagggactatcttccccaagagaggcggcggggactgaggacagaggcgcaccttgtgagtgttctgcaagtgtcccaggtggagctgggcaaccaggcagggtcttgggaaggcctggcttcccgagagatccttcctcggggaggagggatgtgcagggaactccagagaggaagaggaagccacacctgtggaggcttcctggggtcccgcaagccagcctcacccagcatgatagaaaatgtgcagagggctgggtgtggtggctcatgcctgtaatcccagcactttgcgatgctgagacaggcagatcacgaggtcaggagttcgaggccagcctggccaacatggtgaaaccccatctgtattaaagatacaagaaatagctgggcgtggtggcgggcgcctgtaatcccagctacttgggaggctgaggcagaagaattgcttgaacctaggaggtggaggttgcagtgagctgagatcgtgccattgcattccagcctgggtgacagggtgagactctgtctcaaaaaaaaaaaaaaaaatgtgcagagggagggaagtgggaggccgagtactccttctcccagtgctcactggccccaaggtccacctccccagagcaccatgcactggcccaacttgaggttcttgtagctctctcttcagcgtgtccacccttcaggcaggtggctgcgtggtcatgctctccaaaccctacacccatcaccatcctagctgctcacctccacaagctccattcacctcccttgccttgggtacacactccttatgatgtgacctcagatcctgccacttgccatgttttcctgatccaggccatcgccttcctccacagccactagagtagacaaggatgggcaaactagatccaagcctgacccaggtctgaggctcgggaacaagaacccagccaagcccagtggcagaggagccagtcaaggcccctggctgggttctgaaaccacacacacctgtgttcacattcaggccatgcatggcctcctggtggccaaccgctcgtttcagagctcactcattcagcaaatagttacagtgtgcccctctctagttgtgaggatgtaactgtgtgggcggggtgagtgctggtccccaaaagatgtgactgtaccctagcccccgaaacccacgagtgtgacctgatttggaaaacagctccttgtaggtgtgattgagttaaggatcttgggatgaggagatcaccctggatttcccaggggggtcttaaatccaatgatacgtgttcttctgagagtcagaagagaagacacagacacagagcagaaggccatgggagaacagaggcagagatggggaaatagggccacagccgatgaatgcctggagccaccaggaggtggacgaggcaggaaggaccctcccctagcaactgtggagggagcacggccctgctgccaccgtgatattggacttctggactcctgaactgagacaatccgttctctgctgttctgagccacccagtttgtggtcctcaggagagtcacacggcttcattccatggcggctccccgccacgcaccccaacacaacccccaccccaccctcacacccttcagatcccagggatgaagcaaaggacagcaccatctccctgggggtgaagtggcttctccagaaccaaacggtttgtcaagatgtggtcagggccagggactgaacgtgaaatgggaacggaattcagcctcttccttgcgagaacctgggggttctgaaacgtggcctctagaatcccagtttctgtgtgaatttcttgtaccatgtgtgttcccaggggcctggggaacctgtccctactctccttcacccgcggccaaagtggggataaaatcctttctgagccaaagtcccgagccgcgggctacacccctcagagactcctgggactgccagccctgcccagccaccctggtggagtcaggtccctcacaggctgggtgcagccccccaggggtaggggactggcttctgggtgcagctgcattcactatcatttcccagccatgtggcgcatcctcccgtttcaatgttaaaatagaaacaagttcaaggaagatgcattcacctgcctgatctgcctgccagcttcctgtgaggtggcagccccaacggctctgaaaatgatcctcacccatcagggtcccgggctcagctctgtgccctctgcacctgggacacgccagcccccaggtggcctggccttctttgagatctgtccagaaacacgtgccaggcacaggtggctcaatgagactctgtccgagttccccagccctgcatgcatctcgctccagacatccctggccacctccatcgcattgagtccaaacccacatgatacaccccatttctctccaggagactgtctgcaaaggcttccgcgctccctgaccctctagagagggcagcccaggccccagtgggcagccagtataggacgggcagcccggggcagggctgcagcctcagccccatctggaatgcgagggtggtgctcctcccacagacccttacatcgcaaacattttgaggacaaatgattccagaatgaaggcttcttggggccggttttccctgcacacagatggcaaggaggcccgtcatttgcaagagctggcacttaaatgaaaaaacactaagtatatttgctaataaggttccagggtgagcatgtgtgacaatgacaagtgtgaaggtgccctacggtgagccgcggagacgtgggcatcacaccagaatctgggcccaggcctcatgatgccaggagccgggtgccgggctcggcaactactgcaccggctggctgcacggtgacaaagcccgcaagacggtggcaagagctcccttgcatatcgcatggttggctgaaagccccgaaatctgtcctgacaccaaagcaaccatgcatcgcacaagagaatcagcacacattccaggaggggcttggcagcaatgccacgagtttcaaaactgctaagagacctggtagatgctcgagccttacaacaaccgaagcttccgaggaaaccgcgtctggcctggcagaaagccggactcccatcaacaatgtgcagggaaaggcgctcccctctgtcttctgtgcaccaaccccaaccataaacactcagtggaggctgcaccacagccctgaggggcgctgtgcttgtttgcaggtcacaagttggacgcccaaggctccgagcagtaccgtggctgaggctgcacaggaagaggccgccatcactgcccctcgtgtgcggggagcaagtgcattcccagggcccattgcagggaagtccccggaatctacaaagctgccccatggtgttctggtctgtttaggcccaaacttatccactgtttcagctacccaagggaccaatggaagcacagccagccgctggacccctcgtcctgtctttctgcagtggccaccgtactcattcttataacccccatcagtgctgacccgtctccaggctatgtcccctgacaatagagccaactagccagaacgcccactgtgccagaagccgcccgcctctttggagggaagtggtagtttacaacaaaagcagtaagcaaaccacctcacggcctccagccacgtccatgcactgccaccagcctgcccaggccccagagggttctgctgcccccctcgaatggagatccggcccatggagaaagacagcggggtcactggactcaactttcccatgtagggagggggtctgtggcccgacggaaggacctgtggtgttcagacacccctctggattcagtgagtagggctggtgagtttctccagccaagatgctgcatatcccaccatctggccccattgtctggggacaggacacactccactttatctcctggccagtgagttaggcaggtggcatggctgagccccatcaggagcctgacccaccagcaaccaactgaacctcagccagagggcctgatggtggggatgcggcatgtgaacttcaggggcacacaaagcccagacgcagacccggggcatctcccatctccacccatctccactcatctccacccatctccacacatctccacacatctccacctccccacagaagggaggaggccaggaggtggacaatgaagacaatcgtgtggagcagctgctgcggtgaggccaggcacagactccagccttgacgcccaggctgccccgtcctctcctcttgcccctgaagtctacctgtgcccacgtggggagggtgtttgtgcctgtgccttgtctggggaacacctggatcatgacctgtggctgctgggctccaccagatcatgtgatttgtcttgttctggtttcagattctgagcctggtgaggttggtccagggtcccaccaccagccagggtcagctgggccccagggaggctgtgatgggctgaacggagtccctccaaattcatatgctgaaagcctaacccctgctcctcagaatgtgactgtatttggagataaggtctttaaagaggtgattaagttaaaacgaggtactgtgatgggccctcatccagcatgacagtgtctttgtaagacaaggagagccagacacacgaggcaccagggaggcacccacagaggacggccacgtgaagacaggccagagccgccgcagaggatgatgatcccgaatcctggcattcggtggcacgcaggtagggcacagaagtccagcttggctccttcgccatcaggagaccttggacagtcacacgacccagaccaggggcccggcaggggcaggaattttgggattgttaatggctccgtccacagcacctaggacagacagtgcctgccacacagcaggtgctcatggctccgtccacagcacctaggacagacagtgcctgccacacagcaggtgctcatggctccgtccacagcagctaggacagacagtgcctgccacacagcaggtgctcactggacacaggaggtgctgaatgaaagactgaaagggcttctctgccgctgcagcccacatctgtatgaatgaaaaccataaaggttgtccgcaatgggttctcgtgacaacccatgagaagggctccctctggggatagaaacactgtatgtgttcgacaaataaatgccagcccgtttatcctgacctctgctctgtgtctctgtggcctgagattcccctaggctgggaccacccaccctccaccttgagttcctgaagcttccccggtcttttctgggtctctcaaatcctcggttgtaaacagggagtagctgaagcgccctcatcccctggggtgatgcgtcagaggaactgggactgaagtcttcctgttcctccccctcaccccctgcccggttggataggccccagcaagcagcatcagtcagcccaagtttatttttaatcacatgattacccggggtcttttgtcacttaagcagtttaactgggagtgcagcactcccacagcagagcagccagaagaagcgtcagctggcacagcctggtagcagtggacagagggagccagtccttggagccagcctctccccagaggcagttctggatgtccaaggccagtctggtcctatccagcagatgggaaagggcagaatccctcactgagggaacatcctgagtacctgcagcccctggccaggtggtgcccatgtgtgttgatcaaggggacaaactatgactgagactgatttgatgggcagcaaggtggaggggatgaggttatttgtgttatctcttgcttaactgttcatccattcaacttccgctcatcccatctgtctatccatccatccaatcatccatctcataaactgagctattgctcattgagcacctacctgatataccttctcccacttttgaactccctcaaattctcagaggtgtcgcctacccatccatccatccatccatgcattcaaccacccatctatccaaacattcatgcatttaaccatgcatccatccatccatccatccatccatccatccatccatccatccatccattcatccatccgtgcatccaactatccatccatccatgcatccaactacccatctatctatccatccatccatccatccatccatccatccctccatccatcccacccatacattcattcgctgttcactgagcaccaacaggtatcttcttctaccttcagacccacttagcttcccagaggcattgcatagtcactcatccatctgcccacccatccaccccatgtatctgtctgtacctcactgagtacctaccaggtaccttcccccactttcttggaggtactgcctactcattgttcccagctgcctgggtaccctgtgtgtcctccccaggcccctgacatgtcccctgccaggtttccagtctcctctgcaccctatgcctcaccataacttaagtggttgatgcttacctcctcggagaaggaaggaaactagcagaaaacctactatgtgttgagcacacaggctgcctctgttttttcattaaacagtcatcacacgtccataagggaccatcctacttttctaagaagtcacaactggcaaggagtaaggaacagaaggcatatttaactctagatccaggattccttctgctgcccccagcagtcccacaggaagtagcccccatgctggtggaccctgagaactgttaaggaaagagtcagtgtccagaattccagattcccacctggttcccctgctgccccagctacaggactggtctcttccgagtccccacctcctcatctgtaaaatggagtaatgaaaaccactcacaaggcaaaacattagatacactggctgtccacctaggaaactccaaattctgacaacttccaaaccctggaggccactgccctgtccctgagcccacatcccctgtggcctcatgggccagggaagcagacagcttgcagtcctctatgaagcaaagccccttcctcctccttctgctggcaatctcctactcatccttcaaaacccaggtggactgttgcgcactctgggaagtcacagctctccagaccctattgtctcttggtttctaccgactgctcttgaacccacagggtgaagaaaaagggcctgtccctcaggccactgcacaaagtagaagtttggaatgctttttcaaaaggtaggcatattagttctctgcctaggtccaggacaattcttggcaggtttctcttactagtaactacccaggccaagctctgagagggacggggaatcctaagcagtcatcacatatttaactccagatccacagtcccagtccagttcacgccaccccccacccggctctgccatcccataatccagcacttccccgcatgacagagaggcaggcccaggacgcggaatgaatgtcagcactaatctgtttaggctcaaaaggaggcggattcagagctctccatgcacagccaccccactgggcagcgtggctgactggctgccggagataagaggcaagggggcggcctggagcgcaggcatggccactccctgctgggggcgggggctggagtctccctgcacaggtgtgaccagcactgataaaggaaatggaaagaaagtttgccttgggctggaagtagaaaattcacacctctgacgccttgcacatatttgatgagccggctcctggcctggcgtccttggatgtctggcatctggaattctgcagaagcttcgtgcatattttgctgaacacaccatgtggctgcagtgctggtgggacctgagaggggatcagaacctgggagatgggaggtgcctgaggaccagcgtgcatctgccggtgctgagcggtggggacacaaaggcacagggcgggggctggaggggaaacctgcagaatgatcgataacagcacagccaggaacgcaggagctgcaggagctagagctgccagatgccaggggcagcgctcgagctgcacgtctgcgtgccccccccagttcatatattggggccgaaatccccggtgtgagggtgtctggaggtgggggctttgggaggtgattagggttggaggaggtcatgagggtgggctctggtgattagtgtctttgcgagaatagacgccagtacccctcgccccccaatgcgagcacatggcacaaaggctgctgtctgcagaccataaaggactttccagcctccagagggctgagaaacacttctgttgtttgagccacacagtctagaggatttttgttacagcagcctgagctgactcaggaggagacgtgattcctactgggactttattcatcaacatttactgcacacacactggatgctttgggataagcacacagctacagaaaagcttctctatagagcgacgacagcagttaccctacacagaggggccgggagagcccccacgggaagttgctccatgtccccctcaccttctcctccctcctccaggcgggatcctcagatcctggtgaactctgcccagctcctacattccctgtccaccaattcctgtggattcaggctccaaaacgtctttctttctcaggtctccttccctcctttcctacccggctgctgcgacacccccacatggctctttgtggctctgtgaggccctgccaaaccctcagggtcctcttcctaagaccccgtccactgcacctccttctgcctgcagagactcagctgctcccgggcccaagccctcagccccacacctggcctcagccttccctccggatctaactccagctgggcatcccgggccacacttcacgcagcagccaccctgagctgccaccaatgtgtggctgcaggcccctgcctcctacccaaggggaggaaagtggaagaaccaggaacacacagggccccagagccacattcacgcacctggcaagtcgccacccccatggccgaggctttagcccaaggcacagggtgggtctctggcctcccccaggaagctcctgcccttgtgggctcgggcgatcagatcccagggaggtctttccatgactgcagtagaggctggtcacaccctgcagcaagcatcactgagacccatgtggggaaccctgccgggccctccttcctcacctctaagcaccctctctgcgctctgcaatgtgagcctgcagtggggcctggcaggctatgcccccggccccctggggggttcctgctaggatctgcctacgggaggaatgaatgagcccagaaggttggaagagggcaggcagcttcctccctcctccttgctcctttccaagtccctctagggcagcccacagcagctccagtggtcctggcatctctctgtgcttccactgcccacctggctgtgcccctgcagcggtgaccgtggtggtggaattgtgatggctggggaccgaagtgccagcgtttctccaagcactaggacatcgcacagccagacgaagtttcttggggccaatagccctgggctgtgggagccctggctgggccacaccccacctcaggcatctgaggggccccttggctgcacccctgcaaggtctcagcttggtcaagcacacaggccacctcttgagcgataagcactgtcttgctccccaccaaggcttgagtccaggtagccacttcccccagcccaggcagtggcagctgcaccctgcagctctgaagtgagagtgaaggcacaagaggacagacaccacgggggacaccggcgccctgacccagcatctgcggcagcaccaggaagccaagcaaacctctcagcaaaaagccgccccaagcggccaggacctcctcatcaaggattgtcattttcaccccaatttctacccgacctccaactcagggtcaaccagagaaagccaaatctgctaccccaaccaatgacttagaaggccccagtgctagtgagccccgcctttctctgctacaaagcgtttccctcactgcctgcctttgagcctctgcctcatgtaagtagcagggcctggctgttgccacagcaagctcgtgatacccagcctctgcttactctcggttgagtggtctccacgtatttccatgccagccctgggtgcccacatctctcatctatcaccctccttgggttgaaacacccgtgtctcagccctggggctcacagtccctcaaaacaaacctccgggcctccgtcccctcctcctgctgccttgaaaacacagtcttggctgtgtcccttggctctgtcccgcccctatgagtggtcctgccactgtggtgactacccttggagtgtcctgccctgcgctggcctggcctgaggtaagcctggaactcagagagccccaatcctctccggggaacgtgggtctcgtgtagagtaagcttggatgggtagagctgcttggagctggcctggcccccacctggcccagggtctgcctcctacttctgtgagccgtcccactccctgcctcacctgagctgtccctaggtcacccgccgccttggaagttgcagagccttggtgggaaacgcattgctgaggatgcaaatgcaactgaggctcaaaaggtggcctcatgccctgatccgccacacctgagacctcgagcgagcgttattccttcatccgtgtccttcacggttgtcaaaaaaggcctcggatgtgaaaccatttgggcgcatttacggaaaagaaggcagctgagcacatgcatgctgcaccctcctctccagcctccagccaacccagggcctgggggctttcatgggagttactgaagggaaaatcacacaggtgctgacccgagacagggctgaggacctgctgggtcagaatctcacacccacgcttcaaaggtgactctgacacggtccaggaggctgtgaactcacccagcagatctgggggcagagcccagggctgggtagcgtgcccagccacacttgtagcacagaagcagcctctcccaccacactctcccgcctctccaggacagggaaggctgggcctcccttcagggtgggggatgcgggctgccccatgctcacagcccccatctcctctcccaccacactctcccgcctctccaggacagggaaggcttggcctcccttcagggtgggggatgcagggtgccccatgctcacagcccccatctcctctcccaccacactctcccgcctctccaggacagggaaggctggaccttccttcagggcgggggatgcggggtgccccgtgctcacagcacgcatctcctctcccaccactctcccgcttctccaggacgggaaggctgggcctccctccagggtgggggatgcagggtgccccgtgctcacagcccccatctccccgctgctttcagggtcacccctaggaggggccgatgggagcctctgggtctggtccctgccctccatcttgttgctcccctttggtcatcagcacttgcaggtggccttgggtgactcttctgtgtccccaggcatgtcacacgacctcccacctcagctcctctatgccccgctgcccccacactgggggagggctctgccctaccctttccatcccagcctcaggtctgggctctccagatctctctgccacagcccctggggatgagggtggcttgtctgcttccctccaccgctgtactcccctttacccctccacccccctccctccaccccagcactcccctccctccatccctgcacccccctacccctgtactcccctccctccacccctgcactcccctccctccacccctgcactccctgctcagtctcttcccctggctcatccatggtccccacgagtgactggggactgggctgcatggggacaagcccgaggtggtaagactccgcttgggttcacagaagtaggagactgaagggctgggtggggtacaccaccctgaagtggaaaccggtggcagagtttgcagcaagtgcacagggaggtggcaggcggggaggtggggctcggtgccatgcttaggattgccctgctctccagaactagccctgggcagcagggatgggagggacccgggcagttaccagctggctacccggagaacacagtcctgttttctgctggtggaaaagtcttttcatggcctgacattctcaggctcctaatcaccccaggccaggagccatgggggccgggtttccttgtcacatcctggaaggacagctgagtaactgaagattggcttacagactagtgttgggatttggaagcctgtttccagggcagcctttagacctggcactgctggtggccaccaggcttgcgttggagatagcactgtttgggtggggctgacctggccctccctccatatccccaggccccaattccatgctgaatagcagagacaacagcatgtgtgtgcacatgagtatgtatgtgtgtgtgcatgcttgctgcacatatgtatagtgtgcatatgtgtgaacaggcacgtgtgtgcatgtatgccacatggtacatgtatgtgcagtgtgcatgtttgtgagtgtccacgtgtgcatgcatgctgcacggtgcatgtatgtgcagtgtttgtgtgtgcatacatgcacacatgatgtacatatagcacacacatgagcatacgtgtatgtgcacatatgtgaatgtgtgtgtatacatggacaataataaatattagacgaaaaaagaggagagggaaggaggcaggagactgcactgctatatggaacagtggagctgaaacgggggttatcttgtccactctgtacacctcctagtcaggaaaactaaagaagtcacatgacttgtctgagatcacacagcagagaaggaccctgggtcttgactcccagttcatttctcagcccactgcaccacaatgcctggaggctcttcctgttcccaggaattctgagctgctcccaggatacccaccacagacaaaccctgaactgaggaggcctcgcccagacataaatcaccaagagacacgctgttctgaaagccaccagtgccgcaggtcccccatggatggaatccctggggcaaaaggtccttttggcaagagtgaggaagtcaagggtgaacatccactaaccagaaaaagggaccgtcccctgcccacccccacaaccatggtgggtgcctggctaatgcctggtgctccctggagggactgctggcaggagggcaggaaaagacactccctagaatcagggagggccagtgcccaaagggggccccatcagcacctaacccatcagctcctaatgacctcagatccaacagtccacctttaaaataaatattttctaatgccaccccgatattgccaggaaataaaattcacagatactagaaactttcagtatacccacccccaatataattccttctaactgttaaggtgcagacaaactagaagaaggacattgtttacaacacaaccgtctgcatctccatgtgaaatgctcatacctacacagatggagtgaccgtgaatgtgaagaccactagtgccgaataagctggcgaccccctcccaccagccctgctgcttaacagtgaagtggagaaaagctcttggaaaagttccagattaaaagccagcactggagagtgctgcccttaggacactgtagaacaaccctccactgacagcaatcagaacactacacaacagaaacaataacgaatcccccccatcacacacacacagcgaccgacctgagggttctgaagagtaaataagagcagtcagatgggctcaggtgttagtttgcatttcatgggggctttgtcctgaggacctgctgcagacacacaaccatgtggcacaggcgactaaaaccccagtacagctgacatctttcaggctgaaggattcaggggaagaagtgcaggcaactgtaggggaactggggagtgagaggagagccctggagggagaagagccagaggaagggagtccccagttctgggtgtgcatctgcaaaagccccaggctgaccccgaagcacgcatgtgtaggacaggcacaaaggagtggagcaaaagcttaaatgagtgatctgagactttaaccactgaaggcaagatggagattccagtttgagtctaatcatagtagctgtcagctcaaacaaatcataaacatcctccagaggaatataacacaacccacaatctacacaacataatactcacaatatcaagcaaacaatccaaaattcctgggaaaatatgaccccattctcaagagaaaagacaagagatagcaggcttgagatgatgcagatgctggacctaggaggcaatgagtttaatgccactattgtaactatttcaacaaggaaaggtaaatgtggtgaacattttcataaaaaggaaccaaatgaaaatgttaaagttgaaaaacacaacatctgaaacaatccaatggacagccttagtaggataaaagtgacgaagacaagactcagggaacttgacaaatcaatgacatttgtctaatctgaagaagaaagaaaaaaagactgaaaaaaaaatagacaatgtcagggttccaaaggacagtattacaaaaaatctaaggattggataatcacagtcacagagaacgaggcagaaaaaagtattttaagaaataataaacaaacttctcaaatttgatgaaagaaacgaatgcacagattcaagaaactcagcaagtacttctagttccaggaaagatggagtacacacaccacactctgtttccctagttaacgcagctagcaaacctgggcagatgctgttatttatggactctgaaaaataaagagtagcaggcaattggagaagaaaggcagatttccaagtaccactaaagaagctgtgagtttcccattttttcccttgggctgtcacctggctgggactcaaaggtagcctgaaagccacatgtgtataacaagtgtggataaaaagagcttcaagaaaagggagccccaaggttcagagtgcatgggagatcttccctttcattctttattgccttttctcccacccacagcctcaagcaatcctgtggtggcggaggttgggcaggcacctaaaactctggaggaggggatccttctttctggccagaggagctgtggtccacacatgtggaggaatccccattgcttttggcctctctctctctttttctgccatttgaccgtggatgaaggtccatttgcagtaagtttatggcaaagcagggaaattaattaaggtcccagtttttcatccagaagcctgataaaggggtctccatggacacggaaaatgtcagggagactgtagtgaggagggagcagaacagggatcgtgtgaagtggtgtgtgaacttctaggctcagctccaagttgtgcacaggtggatctgacctcgaacagcatatcaatgatattcagaaaagaactaagagataaaaaccaccaccatctccaagcttggcgagtgtctgtgcatacgtgggacagatctcaatcgcaagccaaggggttagaagctcatttgacgttggaaaccatgcataaaagttctataaaaggaatttagggcttgatctcaaccaagtgctcatgtcaacctattccatcgggtttaaacaagacccagagtatcttaacaaaatattccaaatgtccatgatacaggtttcatttacttggcataccaagaactagaaatatgccaactctcaacggaaacaatacaaatgaaaaaaaaattactagatgtgtcaaaagcagaatatagaagacagaggaaacaaatagtgaccttgaagacagatccatagaaattatccaatctgaacaagagagaaaagcacataaacttacagattcaagaagctcaatgcatcctaaacaggattagctcaaaaaatccattcccagacacgtccaaatcaaattgctgaagactaaaaacgaaaaaatatatactgaaagcagctagagaaaaatgacatatttcatacagaagaaaaaccacaggaattactgcagattcctcatcagaactatggaggtcagaaggaagtggaacagtatttttaaaatactgcaaatgcaggattctatacccagtgaaaatatccttcaggaataaaggttaaatcaagacatttttagatgaagcaaaaccaagaacatttgtggccagcaggtcaactttaagaggaatgccaaagataatgcttggaatggaatggatatgataccagagagcctttgaaagtcaggaataaagaagtacagacaaaatggtcaatatcttttaatagactatacttcacttcttacattcttgaaaatacgatggttgaagtaaaaattattatattttatgatagtagtttcaatatatgtgggtttaatacacgtgatagctacaccaaaaaagggagagaataaagcgatctatatggtggtaaggtttccatgttctacttgcagtggtaaagcattaagtaaactgggaaaagctacatatgtgtattgaaatcacagactaattgctttaataaaaaaaaaagctatataattgttttaaagcctccaaaattaaattaaaatggaaaagtaacaagtcaaataataatccaaaaattatcgggaaagaaaaatagagaataacgtgcaaaggaaacaaatagaaaataagaaataaaatggtagatataaatactaacacattaataataacattaaatttaaatgctctaaacacatcaaataaaatagattaccagatggagttttatttttttatttaaaaagttgacttctttattatttttttgtagagatgtgatctcactttcttatccaggctggttttgaactcctggcctcaagcaatccctccccccttggcctcccaatcagatggactttcagaaaactaaccaatgacatgcagtctataaggactcaaatttacatataacaacatagggaggttaaaaacaaagggatagaaaaagacatacacacactaataagaagaaagccagagtggctatattaatatcaaagtagtctcaagtgcaaggaaaattgccagggataaataggaacattgaataatgattaaaaaaaatcaattcggccgggcgcggtggctcacgcctgtaatcccagcactttgggaggccgaggcagacggatcacaaggtcaggagatcgagaccacggtgaaagcccgtctctactaaaaatacaaaaagttagccgggcgaagtggcgggcgcctgtagtcccagctactcgggaggctgaggcaggagaatggcgtgaacccgggaggcggagcttgcagtgagccgaaatcgcgccactgcactccagcctgggtgacagagcgagactccgtctcaaaaaaaaaaaaaaaatcaattcaccaagaagacacgccagtcgtgaataacctaaccagtataataatacctaatgccagcataaacctacaacctaacattggaacttcaaaatacatgaagcaggccaggtgcagtggctcacacttgtaatctcagtaccttgcggggccgaggcaggcagatcacgtgaggtcaggagtttgagaccagcctggctaatatggtgaaaccctgtctatactaaaaatataaaattagctgggtgtggtggcaggtacctgtaatcccagctacttgagaggctgaggcaggagaatcgcttgaacccaggagatggaggttgcagtgagccaagatcatgccactgcactccaacctgggtaacagagtgagattctgtctcaaaacaaaacaaaacaaacaaacaacaaaacaaacatgaggcagaaaccaacagaactgttaaaaaaaaaaaaacaaaaaacaaacaaaaaaaaacaaaatggacagccacacgatgatactggaaaatttccacattcctacgttctcagcaatcaacaacagaggacaagtcagcaaggctataaacacttaaaaataccatcaaaaggaccgaactgacatttaaagaacaccgcactcaacaataacgagcataatatacattcttttcaatgtccacagaatattcgccaagatagaccacagcctgagtcaaaaaaatagaaaaagaacaaaatcaactcaaagcatggagaaggaagcaaataacaaaataaggacagcaatcaataagctaaaagcacagggagaaaggagaaaacttaatgaagttcaaaggtagttctttcaaaagatcaataaaattgataaaaattttagtaagactgacaaagaaataaagacagaagacacaaattactaaaagagatgatatcactacagggctgactttaaacagataatgagggaatactgtgaccaagtctaagataaatttgacaatttaggtaaaataaactaattctctaaaagttgcaaacttccagaactcacctaggaaggagataaattgtcttacatctattaaagatattaagtgtgtgtgtgtgtgtttgagacagagtctcactcagtcacccaggctggagtgcagtggtgcaatctcagctcactccaaactctgcctcctgggttcaagtgagtctcctgcctcagcctcctcagcagctaagattacaggcgtgcaccaccatgcctgactaatttttgtattattagtagagatggggtttcaccacgttggctaggcttgtcttgaactcctgacctcaagtgatccacccacctcggcctcccgaagtgctgggattacaggcgtgagccactacgcctgacaattgtgtagtttaaaaagcatctgaaaaagacttcttgactccagtgatttcgctggtgaattttgccaatcatttcaagaagcagcaacaccaactctacacaattcctcccagaaaagagaagtggagggaacgcttcccaaattaatttataagggcagcattattctgatacacaaaccagacaaagacagcataagacatcaatacaccaacatccctcaggaacatagacacagatccttaaaatattaggaagtcaaatccagacatatattagtagaaagggaatcatgagcaagtgtgctttatcctgggagtgcaaggctggttcaatatttgaaaaatttattgatgtaagccaccatataaacaaactaatgaagaaaaacagataatcatagcaactggtgcagaaaaagcctttgaggaaattctacataggtgacagcctccccccggtgagctcgagcagagcccagcctggaacttgtggcccatgccttccacatttgggttctgagtagcctggcaaaggcagcggtaggaggaggtggaaataaagagctttctggcccccatggtctctgacattacttgaataccatggacccataagagttagtggcggggcctcagtggcaggagagggaggacaaggatgaaaagtccaggtgtctgggcaatgctgaacaccttccagacagcacgtttccaagaaatgctgacaaaaccgaagagctgggaagtgctgcttcaaatatctagatttaacacggccccagatgcagagagacatcgattacagggaggcacctgggtccctaagaagatactaatacagcaataataacggctatgattacaaaataataagtaacgatactagtaaaagcaagatcccagaagtacttcgaaatgtcccgcacaattcctatgtatgaaaaccctgttcataatcttttttttttttttctgagatgaagtcttgctctgttgcccaggctggagtgcagtggcgtgacctcggctcactgcaacctctgcttcccaggttcaagtgattctcctgacttggcctcccaagtaactgggattacaggtggccaccaccacactcagctaatttttgcatttgtagtagagacagggtttcaccatgttggccaggctggtctcgaactcctgacctcaggtgatccacctgcctcggcctcccaaagcgctgggattacaggtgtgagccactgcgcccagcgcgcaggcagccttcttcctgtgggtgtccaccctccaggggcttcctgcagaaactgtgtgcaggggtgcactccggcccctcatcccatccctgccctgtgagcgtccaacctcttggcctctctggtgccctgtgggcacccgggcagagccagtggctttccaggcacgtccccagccccggccccggcctgcagtggtggcagtgggaccacagtggagattctggggacaaggcccagcaggttctcctggcaaccggcctttctcgtgcggaagggactcactcctggaggccgccctcggctccgcaccccgcggctgccatctagtggccacaagcagggacgccaggcagtgagtccgctcctaccaggcgagcgacaggccacaagagggaagacaccgcgccagcagattcctggaacgccgcggcttccggaggggcctcccagtgctggggccatcgtagggccacttttgcatcaccctccgattgttggaaatacaagtttatttccatcttacaggatggctttccgttgcccagctcttgaatacccagccctcccagctgtgcctgtgcagaaagccaagcctatgacttagccgcttcaccgagccccggaccccactgacgtcctggggccaaaggcctctgtgatcttgcggagatggctctgctgctctgagctcgtttcctcactggccgcagcgggttcagggtgacagctgcagcccccgtgcgagcaggtgcaggagacatccccagctcccccagaggcaggttcccagagcgaggcagagaaccttccagactccaggctggaggtctctcttccaccctccagccagggaaagctcccttcctgaatgtccaggctctgatgggaaagatcctttacctgaaaacgctcaaatgctggcctgggttctctgagccttagaggcacattttctgaaacagggataataagggttccaggagcactcactgatcctgggggctggccacggtgctgggcctagggatagacaggaggtgaaccggagaagagcccaggttagcaggtgaagcccccacgctgcctggcacagagcacaccctctcccagaacaggcatttgaatccaccgccgcctgcacgctccttccctccagctgtgtgggcaggggctgtggctacctctctaactagtctcacaacccctgctgccctctctggggtccaggcaggttccatggcatcatactggaccctgctttctgccactagcaggggaagacggggaggcttggagctgctgagggcagggcctcggctgcacactctggggcaccaggcagccccacacccctatcatctcagtggccacgcagcgttgaacatattctgacatacggaattttgctttgtaagctgctttgtctttctgggaacgtgtcctctaagctcacctttacacagatctgcagcttgtcttatgtagatcagcacagaatgttacaaaagagaacggatacatagagcagaccctgggctcagacccaggctccaaacctcctgggccaaccactccacttccccaggtccttgcgcccccgtctgcaaaatggagcactagcagtttccatgatattggacgtttggcaaggattatggaggggagccgtgtgaaggtcaaaggctggcaggtaacaaatgcttaataaatgtgactattcttatttttattcctccatgcatccctttagtagacaagtatctactgagcccctgccctgagcaggagagacaggaagcaggaaggttaatagcagtgttaggagctggactcctgggtttgaatcccacccagctttgccatttatgagctggctgaccttgagcaaggggcttacactctctagcctcggtttccttatctgtaaaaagggataacaaccatatcaacccatgcagataagagtgagcatagcaggcctgtggctgctgccctgagaaagtcctgcccgcagggctggcccctagctggcatctgggagctgaaatgtcccctacatggagaggccgggacacccagccctgcggcagcagctcccatggcgtgttgagccaacactgtggtgtatgcaagcaaaaccccagctttccttccagaagtcgggaattgtggcacgtgccaggctgagggtgcctacgtgacaggattcccaagggagaaatatttcacacatgtggctgcattttttcctagtgggtggggaatgtgctgtgtcccctcaaggagagagggagggggcttcagtctgctcatggatgcctgcagactccgcctaagctgtggcactgttataaaccttagacaacaggatgactctatatcgagtcctgcgagtccttccagaggaccccagaatgtgtgggtggggtcccccgacacaccatcccataggcctgcatgaatgtcccagggttgctacaacaaatgaccccagaccaggaggcctggacaacagatgttcattctctcagttctggaggctggaagtctgagatcacggtgtctgtaggatgggctccttctggaggtgagagacagaactagatggatttcctaggcagactaagaatccctaagcccagctgggaaggtgaccgcatccacctttaaacacggggcttgcaacttagctgacacccaaccaatcagatagtaaagagagctcactaaaatgctaattaggcaaaaacaggaggtaaagaaatagccaatcatctattgcctgaaagcacgggggagggacaatgatcgggatgtaaacccaggcattccagccggcaatggctacccgctttgggtcccctcccgttgtatgggagctctgttttcactctattaaatcttgcaactgcacgctcttctggtccgtgtttgttacggctcgaggtgagctttcgctcgccatccaccactgctgttcaccgccatcccagacccgccgttgacttccacccctccggatctggcagagtgtcccctgcacttccgatccagcgaggcggcgcccattgctgctcccaattgggctagaggctcgccattgttcctgcgccagctaagtgcctggggttggtcctaatcgagctgaatagagctgtaacactgactgcatggcccaggattccattccttggaatctgtgaggccaagaaccccaggtcaaggaacaagaggcttgccaccatcttgcaagtggcccgccatcatcttgggagctctaagaacaaggatccccagttaacagaggctctgaggaagaatctgccccaagcctctctcccagcctctggggctgctggcacccctcagcagtccctggcttgtggccgtatccctccaacttctgcctccatcttcacatgtgagaactaaaaataaaatcctaagcccccgactgactggaacaaggggacaccacagaagccttaaaaactgagttctggccgggcgcggtggctcacgcctgtaatcccagcactttgggaggctgaggcaggcggatcacgaggtcaagagatcaagaccttcctggccaacatggtgaaactctgtctccactaaaaatacaaaaattagccaggcgtggtggtgtgtgcctgtagtcccagctactcaggaggccaagacagagaactgcttgaacctgggaggcagaggttgcagtgagcagtgagccgagatcacgccactgcactccagcctgggcaacagaacaagactccatcacaaaaccaaaccaaaccaaaccaaaacaaaacaaaaaaactgagttctggccgggcacagtggctcacacctgtaatcccagcattttgggaggctgaggcaggcaaatcacttgaggtcaggagttgaagagcagcctggccaaaccccgtcactagtaaaaatacaaaaattagccgggcgtggtggcaggtgcctgtaatttcagctacttgggaggctgaggcagagttgctagaacccgggaggcggaggttgcagtgagcccagatcgcaccactgcactccagcctgggctacagagcaagactccatctcaaaaacaaaaaacaaaaaagcaaaactgagttccaaccatgatgggacaggaggttgggcacgtcttgttatgctgctccctgttgaggtttagccacaactggccggcgttaacactaaaggagagattgtgagactgatagaatgggctcctggtggcaataagagactggattgtaagcaagacctaagactgtgtgaggcaagggtgaagtcatgcaccccacacttaaataaacgagttctggctgtcatagtgcttttctcttcctctagcagccagcaagccccggccttgggatggacaacattaaaaccattgcagctccaccagatgctgataacagaccccatgccagcagccataactataactgtgattggataagaggctgatttcagtagctttctcttgataagaaaccactggccaaagactgaggcatgggacggattctacctcggagcttccagaaggaacccaccctgcagacaccttgatttcagacttccagcctccagaactatgagagaccggctctgccggtttacagaggctgctcactgagcggctttacgttcctgcttcaccttttgacatacagagcctgactgtaatgcctttaaatgtgaagcctccaccccaggtgaacatgggacgcatgtaacacgcatgtgtgctcagtgcacatgtcaggacctgctttgtgaatattcacagctcctcctgtaacctgctgagtatgcttaacctgccataaccttagccaatgcattcagcataaagccccgttccaccctcacctcctcgaagcgcctgcctctggttttggctagaggcccaattcccagctcacaggttgtaaccctttataatagtctcccttctaaatttataaatcgtgcaattcttgggctgacatgtgactttctgctccccacgtttgttcctcctctcttctaaggtcacctgccattggatttggaggccatcgtaatctaagatctcatctcaagatccttaactacatttgcaaagatgcttttattttccaaataaggtctgactcatagcacctggaagttaggacgcatactggtcatgggtggggccagcattcagcctgacaggacccttgaggggactcgatgaatccctaccctacagtgctgtgggagtgtgcagcacagggagcggctcgggaaggccccatggtggctgctcccctgagcattgcacacctgtccctgcctaggcagtggcctggaggcttccagctgaaggcagttgctgaggctgcaggtaccccaggagcaaatgaagggattaacctggagggtggtagtcagtgtaggaaggctcccgggaggagtgacctgtggggcagaggctggaggatgagaagagccagcaggaggcgggtccagagccatgtttgcagggcttcaatgcagggaggtgatggtcccctggaggatgtgctcagggagctgcaatgcccaggggcagtggtggaggtgccggctttccaggctgcaggtcgggtgggagaggccccactgggaggagagcgtgggaccctcctctatcagtgtgctgggtctctggataaatgagacaaagtcgtctgctgtggactgaatggtgtctcctccccacaaattcaaatgttgaaacccaaacctctaacaggatggtatctggtgatggggcctttgggaggtgactggggtgagataaggtcatgatggtggggcccctatgatgggatttgtgcccttactaggagagataagagagtcccagtctttttctcccttggccacacgggggcatagcgaggaggtgtccatgagccaggcaggctccctgatctgggactttcactctccagcactgtgagaaaatcgatttctggtgtgtgagccccagtctcgattgtgtttgtttcagcagcctgagctgagacatcagccttccccagacccacagaacgaggcaccatgtctgcgtgggatgatgatgatggtgaagggtgtccagtgagtgacgcacctctatgggtcctctggctcatcccgggtgcaccagtgttcccctcacattctggagaagactctgaaacactccaaggtgcagggcttccccggctttgccatgtgttccagtccctgggggtcttgccagcaggcaggctctcattcagtaggttctgggggcctgggagcctgcattcctaacaagcacccaggtgaccatgcccatgctgtgctccatgggccacgttgagtggcaagatcttcacgagtggcccttgacctcagccatccttgtgcagatacccccaaacctgagctgccccggagggctttttaaagcatagaacttcagattccagggtggagtctgggattctgcattcctagcaagttcccggctgctgctgctgctgctgctggtctggggcatccagctggagcaacactgcccaggtggttctcagccccagcggcttttctcaatgactgctgccctggccccgcccactccatcagcatctgtgggcgtggggttctttttgcagcgccccagagattcagagaacccctgacttcgctcctgctctcttttcctcaatctgccaatgctcatctcatgaatatttcatctttaaagcagacagaatagagcaaagctccaacaaagcaaaacctaagccaacgcggtagttctcaaaattctgtggttttacaaacgtggcctgaaattagcttatttttaagccgaaggaaaatgaagcccatgtcaatcgcagacctcccaagtgtcctggctggagacagaagttctccctgggtgggtactgtcaggctgtcggttagtggcatccagggccccccagaccagcaggatgcagaggaaatgagaaggaatgtcagtggtgggggcgcctcttttgagtctgtattctggagttggtgggcagctggtctgagggccatggtgagagtcttccaccagggtttttgtggtgccaagtgtccgggtgcttggagaccaccccagggtgctgcccctccagtctaagcccagccactggatgacagggctgatggtccagtacagaggtgcacagaccccaggccccaggtccacagatcccacaagcagtggaggtcatagctccttcctcagtatgagccatctggatggcctagtgtctaccttagggcaggtgcccctgggtcctctcaggtaagccacactgacctggagaggcaagaggtgaggggcattaaggccacctggccctctacagcggccacctgaaatgtgtgccctcatttcagcccggaggaggagggaagcacagacaggtggtggccttgttagagaagctcagaatggaggcgggagagatgctgtcacttttcaaagtcatggctggtggccaggccacgtgatgggagcacgctcacctgcacaccaccatgaggcccggccatactgcattccacctgggcacatccctcccagccactcaactctttcctaaccaccccctttccctgccaaggagcctgatctgaaggagcagggtgtgacaggggaactcattggctgtgcgacctggaacaagtcacttaacctctctgagccttagtttcctcatgtggaggatagagcgaaaaccaatctgccttggagggtgggtctaagttacaacaaatgcaacccaaatgatgcatcctaatgaacaccagtgatgaagcacctgccacgtgcagcagccacgtacataaccatctttgagacagggccatgggatgggaactcccatccccatgggacagcaggggacacaggggcacagagggtttgctggcaggggtggagctgctccgggataactgtgctgccctgaggattgggtgagtggatgtgggtgaagcatcagggcctggctctgcagggaagtgtagcagaagttggacgttctcatgactcccatgcccttctgtgctctgagctgctcgggaccaggctgggctcgcagtggtcagtgaaaggccacctactggggccagcctcatgaaggggctgagggccatgtgctttcgggccaacagcacccacagaaagcaccctgtgacctggacagcagcatgcctggctctgagcctgttgggccatatggatgcccgatgcataatggtctgcagctgactgcaataaagagcaggcaggcagaatgcatttgacaggagggtgtcacccctagaaccacacccagggagacggagaggcccaagcttcaagggagcacagccccattgcaggcttactagagagagaggctcagctgtcctgggcctctgggcacactgtgagtggatgtgactcagcatcaaccacactattaaaccgctttttaaaagggtggaatgtatgaaagttagatgctgacatgaaatcataccacattaaactgcatgtatttattcagagctgtgggaatcatagagcaaagttttccattgctcaaactatctgattattaagtcatccatatacccaccaatccatccatccatccatccatccatccatccatccacccacccacccacccacccacacatcaagccttcctttatctcttccttcccctctctcttttgtccatcaatccattcacccacccacccatccacccatgcatccacatatccacccatccatctatccactacccacccatgcatccatccatccatccatccatccacacatccatgcatccattcacacatcattccatcctttatccctccctcctccttctatccatctatacattcacccactcacccacccatccatccacatacctacccacacatccatccatccatccatccacgcacccatccatccacccacccatacatccacacatgcatctatcatccatccatccattcacacatcaatcgatcctttatccctccctcccctctctcttctatccatctatccattcacccacccatccacccacccatccatccacctatctacccacacactgatccatctacccatgcatccacatatccatccatccatccatctacccacccacccatgcatccattcacatatccacccacccactcatgcatccacacgtgcatctatccatccacacttgcatcaatccatccatcatccatccatccatctacccactcacccatccattcacacatctgtccatccactcacacatccatccatccactcacacatccatctgtgctttatccctgcctcctctcttccatccatccatccatccatccatccatccatccagttggtcacatatttattagcacctgttttatgccaagttctatgcagggcaggcactgatgaatcagagagggtgttacatatggcccctctcccaacagattcttaggcctggagggaagtaatccattaatgaaagacaagccactgaacaacagcccaagggaagaagactacaccagttctgttttgatcggggagagaagtgtcagggcaggaagtggggaggtgcagaactgaggtggaagggaagagggagttgggcctgccttccatccatttcctgtttcctggggaaacattatagcccacgtctgtgtgccagtctttgtgacccaagtggcatggctggccgcctccaaagatatgcatgcaattcaggtctggtcaaagggttcatccaactcccttggccagcatgattgggtcagggatgggcagtgattcaaatcagtccagtgaaattagatcctgaaccttcttttacaatgactgggaaagaggcagtcttgctcttatgtgactactaaaacagcagaatgctagcctggtgctgccggtgaccacctctgaatggcatgggggagttcatacagacaacaccagagaaaagagaatgagagcttcttaaggctccctaagcacctggatccagccaggactgaagctgttattcctaaacttaaaagccgttaaatttctgtttggtttcagccaggataggcttgttttctgtcatctgtaactaagtgtccttaataacatggcagggtatagcctcagcaaagagatccaggagctcccaagaagcaagaactcccatgaggctctgaaatcccctgcgagagacccagggtggctggtgtaacattaagtgggcacaaatgcatctggggcaagtccctccccagctcaggcttcagtttccccatacatgaaataagttttgttttctcacttaaagcttcccaacacttttcttgaatgacattttgtaccttatatcctgaactgctctgaaattgggaggaagtagaggacatctgtacggggtgagcaccttggaaacgggaagaaagccattacctaggaggtactgtgacagaggtggccagctgcctactctaacatcagttctcaacttactcatccatagcaggttatctggaataaagccaacagctcagcctcctttgagatgatgttatggctgatcatccataattggaagcagagtggacaatgtgcatgtccttaaaagagggaatgttttcttgaacctttcgctcttcctctattggaacgcagatacaatggctggagtctaagcagccaccttgaactgcgaggcagcctattaaggatgttggagcagcaagaaaggcagaggccaggtccctgtatgtttgaagccctcatatcagctctggactgctgccctctgtcttctttaatatgacagagaaatatgcctctgtgtcatgtaagccatgttctttagttgtttttctgtcacatgtggctgatgggactctgaataacagcacgtcttggataatctggctgggaggaaggagaagtcagaggggaggaaggggtctcttctttcaagatatggatatttggatttttgtgttaatttgaaagcatcttatttgatgctttcgaattacagaacatttccctcaaacacctccaggccctggtttaagtcactaaaatagtttccactcctaagcaaccgcatcaggggtttaatcaaacaatagagcagtgtacgtggatatcaatgcccctcagaacagacggggccggaatgctccttgccgctctaacaggtaggcagggattgctcctcgcttgttaaaatgtacctgtcgattttcctcttgtttcataacaactccattttgtcactctaattttagtggcaatgtttttgttccaatcagcgatcattttggaaaagtaggctgctggaagagctcttggcatacaaaatgacaagcaatttttaaacggcataagacgggtgatttttaaccacacggaattctaaatctgttttgagctggttagcgctccttagaaaataactagctgtccgggagatgtgatgtccactctgctagctctggtgtggcaggcctactgtgtgccaggcacggacacggggaggcatcagacagggtccctgccccaaggagttgcagagtggggacacagatgagagaagtgaaaatggacatgggcgctgggcttttgaactgaaggctggctgtagagatgatgttaggccaagcagctgggagagcctcacctctgccttccagcccagggtcctgcccagccccaggagagggccaggcagcagccagactgacctcattctctgggctcaagatcccagaatgtaagaaagtttggcggtttttcgaaaagttaaacacagagttaccatatgacccaccaattccattcccaggtaggcacacccaaaagaaaaagaaggaaaaacaggtaagcatatccttacatatggacgttcacagccgcaccactcacagatgcagcccgaagggtgggagcaacccaagtgtccctcaacagatgagcacataacgaacatggtccatacacaaaaggaagcactactcagccttgaaaaggagcgacgtaccaccacaacgccacaatgtggacgagccttgagaacatggcactgagtgaaggatgccagtcacaaaggccatgctggaggatttcattgataggaaatgcacaggaaagggaatctgcagtgatgagaagtagattagtggctgccaggggtggggggggcatgaggagtgactgctaatgaatatagggtttctttttggggtgatggaaatgtcctcaaattaaaaagtgacaattcacaactccaggagtatctaaatgccacaggattttgtactttaaaatggttaatgtcaatttcgcctgaatcaaaacacaaaaaccttccagaatggtctgctggggctcagatatgccagtgctccctttccctctgcttcttgcactcagattaccaccaggggtcctctgggtctcccctgcctgactctgcagggatccgtgcagaaaggcggggcagggtgctagaaacaacacccagatcccctttagatccaagctggccactttctagctggggtgggggggctgaggatgttgctgaatttcttggagcctgtttccttctctgtaaagtggcgacagctgcacatcctggggccaggagtggcatcaaagagaaggtgcagcatgcagtgtagatgtgagttccctccctgcctgtctactggggcagaggccatgtctgatggacagggtagttctgccagtggcgatttactgagcaggcctctgcaccagacagtgaagtagtgatggaggaagtcgtggacagggaggataaagtccccagcatcacctgagagataggcaagaatagagctccccaaatcagccaagtaattctggccacaagagtgtcaccacaccaagaaaaggatgaggtgaggaatgtgacccggaggcagttcagggaaggcccttggagtggcggcacagtggggaggtggcctggccctgtggggaagcttgttggcagcagagagagctgggtgcctgcaggagtgagggccggaaggaggggccatctctaaccactttggcatctcaggagtctgtggggcacacaccacagcctgcacccctgagttatttatcttgcaaaggaagggagtagccatttgcaggaggttttccaggcaggtttccctcatcaggagaaacaaggctgggggaagcctcaggccatggggagcctggagatggagggaggaggcgggcagtggtggctgcaggggtgtgagggtgaggccaaggacttggctgctgaggccttggctctggctcctggcttccaaggttctcaccctgcacatgggaagaggggccaggtgggcaccagtggcagtgtcaggtccagagacccactccaggggggtggggaaggcaggtgtctccagctttccccaaaggtgtctgcacaggtggccgaagcttcccaggctttggtctcacatccgcatcttgggtctgccttgtcggggtctgtccacgctaggccaccactcttccccaggtgtaattcgctgagaggctttattccctggaacgcagggcctggcatcctacttgttctagtaagaggttggcggggtgaatgaatgggtgggtgggtggttgagtgaatgactcgcctgagaagttccagttccggtctccttcagcggagcgagtgcagcccatcatcagggcccgtgctcctggcagtaagtagggcagccctgcttcacgcggtggccccagggacggtgcccactgccctcctttgctcgcagacatgtcctcgtttggatgataaatgatgcggtcaccctggcacatagactccttctaggaggatccaggagaaatgccaggagcttcaggaacaacaaataggtcaggtcgccactggggttttctatctgtgccagagctcaaggacagagcatgtccctgaacaacgctggagctgcagggtgacctgagcttgtgctcaacagacgtgatgcatacctggtgcacacggcagggggtggggcaggggggctctctgagccttctgcgagagcacatgaaatggcatgtgcgtgcatgcacatgtacacatgtgtaaatgtgagggtgtacgtgtgctgagcacaagtgaagcatgtgcagcatgtgtgtagtatgtgcataagcacacatgtgcgtgtgttctatgtgggcatgtgtaggcatgtgtgtatgttctatgtgggcatgtgcaggcatgtgtgtctgtgtgcaggcatgcacgtatgtgcacatttgcacgtgtgtaggtgtgtgtgtatgggtatctttcatctgctactcaatgaggtctgtggttgcatgtgtttgtgagagaggcaccagccagcacaccctgggtcctgcaggtgctggaggctgaagggggtgggcatccatcatcttcctccgccatctcctaccctatccctgggccatggaggaaggccttacgtaaccttgtgttgagcatgtaccttcccagtggcccacggacagtgtgacctgggccctctggctccctctgattctggtcgcaaagcagctgaggggaagatgaatacccttctcagctgagtatgtgggtcagataaagctctggtctaggggagaaagttctagtctctgctgccgcccacttgatgtgtgacttggagctcggctgtgtctcctgctctttgcctctggtgtcctcctgggaatcagcaccaccagaccagcctggtctctgatagtaggaatcttgtatacacagcagacttgggaaggcccctgagggtgactggggtcatggccatgggcctgtggtcctcatgcctctgctcatccgcctgggtgggaactttctgtgcccagcactgtagagaccagctgtccagctgtgttaacactgaggcccccagctggcctgaaaatgcccacctggacagaagccactgtgcctggagcggccaatgagccggggtcaccatgtgatggctgggaagttacttaggcccaggggccttctctctaaaacgggtcctcagatgcaattctggccctgtttatccaatggacggctctgggaaagggcttgggcaccttgagaagttgtaaccgtttacaaataaaaagctccacagtgatgatgaaagtgacacccatttcggttctctgagaatcaactggagcatgggcctcctctctccgaggaaaagtaacctttcccccaggttcctgctctgggatcagtccctctccgacacacagagtgctccagaagttaacaggcacagttaatctgtgcacagatctgcaggaccctggtagtcaataagagatccctccttctctccttccctccctcttacttcctttttttttttttttttttttttttttttgacagggtctcactctgtcacccaggttggaatgcagtggtgcaatcttggttcactgcaacctccgcctcccaggctcaagcgatacacccacctcagcctcctgagtagctgggaccacaggcatgtgccatcacacctggctaatttttttgtatttttggtagagatgagttttcatcatgttgcccaggctggtcttgaactcctgagctcaggtgatctacccttctcagcctctgaaagtgctgggattacaggcatgacccacggccttcggcccagagacagtttctataaaagacggcttcttgccatctcagcacaccatcgcgaaggagtgacgggctctttcagagacatggagggccaggcaccttgtgaccacatgcacaagtgaccagcacacagaagtggtgggggcagctgggtccctgggcgcctgacccaggtggggcccatcccagggcagtggcatctggatggagatgcccagtggcagctcatcttcctgcatgaggactgcagtgctggaaccttctgagcacattctcagggttaaaaaggtgaagggagcagctgggctgggtggagtgggtgggtatccatcgggtcggacgatggctccaggggatctggcagtttttggcagttacttcacaggacagaggctctcacccaagccacctggaggaggggcgtggagccgcgctgggggcccagcgagcttctgcctccaccgggaggggtgactctaagctcattccaggagcagctgggctgccggccagcctgccccactgtggccacacacggccactgatggatttaggatttggaggttcataaataatgaacacttcctggagccaaatccccgttcccagttgagctgccaggactccagaatctgcccctggtctgtgccatcaaggtgaggaagccaggaaatcgctactgggcctgggggttttcaccacaaggtgtctttgtttaaaggcagcaaagctctgaggtctaaaaggtgaaggtctctaaggatgaggacggctcaagtcagtggaacccactgtgtaagctgtgagaccccgggcaaaatgacaaagagccccttgtttaaaatgattcagagtctccgggtgctgacagcagaacattacacaagcatggggcccgtgtaacagtgggtacaagcccccctagtttgagaagtgtattggtgtggtgcctcacgcctgaaatcctagcactttgggaggctgaggcaggtggatcacttgaggtcaggagtttgagaccagcctggccaacatggtgaaatcccatctccaagaaaaatacaaaaattagctgggggtggtggcgcgcgcctgtaatcctagctactcgggaggctgaggcaggagaatcgcttgaacccaggaggcagaggttgcagtgagccaagatcacaccactgcactccagcctgggcaatagagcaagactctgtctcaaaaaaaaaaaaaaaagtatattattccatgcctctgaaagagtgaaggacaggccatcctcacatatgcctgattatactgactatatcatgttgaaacattggagaaactatagtttcagaaagggtgagctgacctgtcgcttcctacatgcagccagtgatagagatgcctctggaaggggtcccctctctgcaccagggcaagaaaatggcccttgtcaccagaggctgggcactggaggctgcagtgggcctgagtaaacatacataatggagtagccctcatcttccactgctttacaccacctgtatatgtcctagggactccactagaaaatttactgtcctagccagattttctttgccctgtcgtttcttttcaaatttatcattctttgtcaaaaagtacaaaagcgtcttgcttgggtcacttctctgcatttcgctctcttgcagaagatccccatgtatatgtaaaaccaatacaattggtatgctattcttattaatctgcctgctgtcaatctggtttccagatccagctgaagagcccactaagagctaaatggcagttggaggtgacctctggctcctctaatcccccagtctccgcccatccccagggctgtgggcaggtcttatctttactgagctgccaagagctgaaccagagagaggccttctagaacttgtaggaggagctgggggtgaggcaaccacactactggcctggatgccagtgcaccgctcaagaacagctacaaggtgatgtcttgctgtgcaaagtagctgggcgagcggctcacagggcagcgtcctaaagacaagagcaaagctttgagatgatgaggccgttcctgaagcgttattcacaagagggaaacatgcgaacaactgcagtatcataagtcagaagtggggggaacaggcgacaaatgtcacacatctgtgacaactggaagagccattagcaatggtgctttggaaggatcttttcaattcatgacatctcttttcacttggaaaaatgcagattcataatcatagagaatgagcttaatgttgctgaatatacatttatgctcaaaggactacagcctcagtggtgactatgaacgtgggatagactcaggagtgattttaattttcttccttatacctttctttattttccaaatttgctacaggactagatattacttgtataataaagtattagtttaataagtgaccttctctccaaagaagatgcacaaataaccaataaacacatgaaaagatgcttcacatcattagttattaggggaatgcaaatcaaaaccacaatgatatataggtctaatacccactaagatgcctataacgataacaacaaaccagataataggtgttggcgaagatgatggggaaaactggaacccttcctacactgttgtcgggaatgtaaaatgaagccactgtggaacacagtctagcagtgcctcaaaaggttaaacctacagttcccttgtgacctagcaattccgctcctagatatatacccaagagaagtggaaacaggtgttccaacaaaccatgcacacaaatgttcacagcagccaaaaactggaaacaaccaaagtgtccatcttctaatagaaacaaagtatggtataaccatacaatgaaatacaactcagccataagaagcagtgagattctgatacatgctatggcatgggagaatctcaaaaacactgtcctaactaaaagaagctggtcataaaggaccccacatggatgatcccattacatgaaatggacagaacaggcaaatctagattgagaaagtggagtcatggttgccagggctccggtaaaggggaaatcggggagtgacttttgtttttttttttgagatggagtcttactctgttgcccagcctggagtgcagtggtgccatctcggcttactgcaacttccacctcccaggttcaagcaattctcctgcctccacctcctgagtagctgggactacaggtgcataccaccatacccagctaatttttgtatttttagtagagacaaagtttcatcatgttagccaggctggtctcgaactcctgacctcaggtgatccgcccgccttggcctcccaaagggattacaggagtgagccaccgtgcctggttgggagtgaattctaatgggtacaaaatttcttttggggtgatgcaaatgctctgagattagagagtggtgatgtttgcacaatctcgtgaatatgcaaaaagccacttaatggtgcactttaaaacagtaaattttatggcattgaaattatatatcaatttaagaaaagaaaaaaaggttggtgtcctgtgtgaattccttcggatcacagaataatataaaactaaacaggcgagggttaaccgtcaaaatttgattttaggccaggtgtggtggctcacacctgtcacctcagcactttgcaaggacgaggtaggaggactgcttgaggccaagagtgtaagaccagcctgggcaagacagtgagactgtctctaaaaaataaacattgcttttaggctgggtgtggtgatgcacacctataatccaacactttgggaggctgaagcgaaaggatcacttgagtccaggagtttaaggctgcagtgagctatgattgcaccaccgcactccagtctgggcgacaaaggcaatcctgtctcttaaaaagagaaaaaattggctgggtgtggtggctcaggcctctaatcccagcattttgagaggccgaggcaggcggatcacaaggtcaggagttcaagaccagccttggcaacatggtgaaaccccgtctctactaaaaacataaaaattagctgggggcattggcacgtgtttgtaatcccagctactcgggagggtgaggcaggagaatcgcttgaacctgggaggcggaggttgcagtgagccaagatggtgccattgtactccagcctgggtgacagaatgagactctgtctcaaatgaatgagaaaaaattattttgcagactgctttgattcaattaaccactttgaggtatctggaggttgcgtctgctgaaggtgagtgttgactctagacccacatttgcagatggtgcccaatccaccactcgcggccatgtcctcttggcttcctgttccaggtctcctagaaacacgggttcctccctggacccggtgctcctaagccacacaacctggctgtggacagggggctacagagtgtcatccaagatgctctccttggttacatgatttgtttgagcaggagcctgccctttacacatccactctacatatgcctgtcttaaatttaatctgcaaatgtggaggtttcatcgttaccagcacgcggcccccataagccaatgtttattcataatccccgaatctgtttcccatcgtctatttcagaggagccaaaaacaacatcttcattcaataacagagcaccatatgacagctttcatttcccagaatgagccatggcatgctctggaggttgcagcgggggcaggggtggcctttggcctccatctttgccccagctagaagggggctcccagccctggctgaccagacccagacttggtgtcccagtgccaagcaagagaacgcaggtctgtcctcactaggttcccatctgacagatggcacatcagtgtttccactgcatgtactgggagcagcccattccttccaccttttcagggcatgacaacatcagacttctggaacacccaagaatccaagacactgatggcatgagtgagtgggggcaggtcacccacccctcccatgtggatgtccaagccccaaccccattcctctggctccacaggggtagggctgaggcctgcaaactggacttgggggataggacaggcatgcaaagtctaaggccacagtgcatctgggttggctgaaggtaactgataccttaacactctctaggggccaaagactcgaagacaacctggcctgggatgccagtgatgttgctggtatcgccaagagcctcatgcacgcctcactgccttccctgttgctcacaaactctatggttttaaagacatctcattgggtaatgtaaaggtttacaataggaagggatgcacaacttgaattgtggtgagctgtgtatgaaaggtagagtgagtatctataaacatccccaagcaaagcccatccatccatctacctagtcacccatcctcccacctacccacctaactgggtgggtcttactagattcccacctactcacctatttatccatctactcacccactcagccacccatccattcacccatccatctatcctcccacctgtccatcccttaaccactcatccatccatacattcatccatgcatcaatccacacatccacccacccatccatccacccacccactcacccatcctcccatctacccacctaactattcatttagacatccatccacccattgagatacctactaacccatttatccatctactcagccacccttctgtcctccaacctacccacctacccatccattcatctacccacccacccactcatgcatccatccatccattcacccactcattcactcacccatcctcccccacctacatatgcatttacacatctgcccatccatccacccactcatccatttatccatccactcactcactcatccacccatccatttacccatccacctacccatccattcacccatccatctatcctcccagctacccatccattcatccacttatccatccatccatccactcacccagtcatccatccactcacccacccatgcatctatctatccattcatccatccttctacctacccatccatttatctgtccatccatacacccatccacccacccatgtattcatctacccatccacccactcacccattaatccatctaacctcccactactcttcatccttccaaccctgctagcccattcatccatctgatcacccacccatccatcctcccacctacctatccattcatccatccatccatccatccatccatccatcagaagtactttctcagcccctactccatgccaggcactgtgtgaggtgcagagaatactgatgtgagtcaactgtatcctcctgattcttggctctcatggagggtagtaaaccttgatcaattgaccccacaaacaggcgtttacaaattaattaacctccaggtccttgccttcagtcctcttggcttgcaccatttgcacttattaaatctgctccaacacgaggttcctgatcccagctcatcaaacacatcactgggaaagctgcttaaaaatacagattcccaggtcccaccccagacattcaggtttcatgaggtggagatagagccctggcatccacattacttttctatagtccaggttgagggccataccctaacacatggctgtccagacacacacaacccatgtttcctgggtatctgcagctgaggaaggagaataatgacaggagagctagcttgctcctggtgctttccagtttgaattcattcccctctcatagcagccctgtggcaaacacattactgtcaatgccaacagaggctcagagaagctgagtaacttgcccaaggtcacacaggagacataaatcaggagtcatggactctgatgtttgccttttcaatggaaaagaatccaggtcaaacccccagaacagccctgagactgacctaaagaggcttctaaatgctgatgggccagggtacacccttgtcaagtagcagtctctgccttcggctcacacaacaaaatggccccacagaggatgggattgtgtggtaagaaagggtgaaactgagaagtcatccacagaatgcagcttggtttacagctgtgactctttgcctctgaaatagactaaatgtgtgtgtccccctcaaaactcctatgctgaagccatgaccccctcagtgtgactggatttggagaaaggactttagagaggtaattaagattaaatgaaggtacaaggcagggccttgacccaagaggactggcattcttaagaggaagagagagcagaggtgtgcatgcacaaggaaaggccctgtgaggacacagcgagaaggcggccatctgcaagccaggaagagaagctcaccaggaacttcccctgccagcccctgatctgcagcttctagactccagaattgggaggaaatacatttctgttgtttaagctgcccattctacagtatttcatgatagcagcccaaactgactaatatagactcttccctgcctactgccctccacactggcagcccagtgtagcactaagaaggtttctaaccccgtgaatgtccgggccatgtcactgcccttctctcctgaaccctctgcccacagtggccactgtacaaggtgacttttgcagacaccacatcctgtagcggcaggaggggctgtggagaaaaaaaggacagggttggtacccagcattaccaggttgccatagtaacccagagcaggcaccaccactgctgggaggggacgaggaaggcctgggccccacagcaaagccagagactggatcctcccaaaggaacctgaaataacacacagacctggcagaactctattttgagggtgaacccaagcatggaagctggtccttaaaacacagagcggctgctacgaaacagcagcacatacttcacggcagcgaggctctgagtgtgttttaataaagtggcatacgagacagaaagggtgggggatgcaggagtctgccacggttgtttaacaaaaacataatcattagcagacaggacaatgcgtcctcatagctattttatgttctgtgagggaacagctagtaacttctttggaagctggcttttgtggcttattaatattttagattacaattgtgctaatagagtcatttgcctgtatttttaaatgctctaaagataacaaagacattctattttggaagaaccaaacatgggtatgctgatgttttgccgagggtttatacacactgtgactaacgacacttctgtttaataggactgtaccatgccctgttccatggctccaaccagagccgcccagagatgtgggtgacagctcccacccctttcacatccttgggagggcattcctactccctgagaaagcaggtcacagcaatatcctcctctgatcttcaaggagctgaggcgcttggcgtccctgctgaaggcatatctctaactatggcctgcagaggtcctgcctgccaccccctccttctgctggttccagcaccccaactgtccttggcaagccatcttccctacacccctgacccagacccggccagtcacccttgctggtgcccccaccccctagccagagtgactggttctgggtgggcatggacatcattcaggtcggtcccatcaggactctcgctaagaagctagcacagagccattttctttctgcaggacttggacctataaggacataagccctggagctgccaggcaccatcctgagagggagctgctcaaagaataaagcccccatggagaaatcaggccaagagatggaatgagagctccctggggataccatttgagcagctggatccaactatgcctgatgccagacaattttaggcttctccattgtgtacactaataaattcctttcgtagggacaggggttggagggagccctggggttttgttgcctccaatttaaaaagcaataatgaccagagaagcccttgagttggtacaggggaagggagaggccctgggtcagagtttaaccccagggctccaggccagctctgccatgagccaggcattcgatccccagtaaccagaagcccagatttccttctctgaaaaatagaggcctggctctaaatgagtttttccaaattggagtccagaaactccaagtcatctgaggggcatctcatgtctgtttatttggtgccaacatgtagatgataacctaaatacatgaccctatacttatctttaaagacaaaactgtttttccctggtaatgcatttttttttttttttcagatagagtcttgctctgtcacccaggctggagtgcaatggcacagtctcggctcactgcaacctctacctctgggttcaagcgattctcctgcctcagcctcccgagtagctgggattacagacgcctgccaccatatctggctaattttttgtacttttagtagagacggggattcaccatgttggtcacgctggtctcaaactcctgacctcaggtgatctgcctgcctcgtcctcccaaagtgctgggattacaggccctggctgtaattcacattttcaaagacagaacttctgtttcacaatagtttttttgttttgtgtttttgttgttgttgttttaacgcaggagatttccctcttaacagtgacctacacgttactaagtcagagagattttgaactaagcagtaactatcatcccttccggttctcaccttctctggatggtgtttgtgtcggttctctgtttatgagcccaaggagtgaggggttccattcgtcagctgacccacatgcaaatcctcaggctgaaactcatagggctgtgagaccccggaccggttgccgtgagaccccggaccggttgcatgtaaggagctcacatccttacatgcaaaataggaacgacaatactgaacacacagttcacgattgttctggagattggaggaaaaccatgagaaacgtccggtttgaagccagctgcccaacaggcactggctggtgttggaatcggggtcaggattattgtcaggaccctcagagccccatggtacccactgcctggtgcaaacctctgaagctcccccaacccaggcatctctgagagccttaagttaaggagcctgtctgggaaagggaccattgcttggtcatcctcaaagctgcagggcagagttttccaaacacagtcattcctacacatttatttctaaaagcagcttgcaatttacttacttattatatatatatatatatatatatatttacttatttatttattatactttaagctctagggtacatgtgcacaacgtgcaggtttgttacatatgcatacatgtgccatgttggtgtgctgcacccattaactcgtcatttacattaggtatatctcctaatgctatccttctcccctccccccaccccacaacaggccccagtgtgatgttccaaaggaatataaatcatgctactgtaaagacacatgcacacgtatgtttattgtggcactacccacaatagcaaagacttggaaccaacccaaatgtccaacaatgatagactgggttaagaaaatgtggcacatgtacaccatggaatactatgcagccataaaaaatgatgagctcatgtcctttgtagggacatggatgaagctggaaaccctcattctcagcaaactatcgcaaggacaaaaaaccaaacaccgcatgttctcactcataggtgggaattgaacaatgagaatacttatttatttatttagagacagtccgctctgttgcccaggctggagtgcagtggtgtgatctcggctcactgcaacctctgcctcctgggttcaagtgattctcctgcctcagcctcctgagtagctgggattacaggtgcccgctaccaagcctggctaatttttaatagagacaagattttgccatgttggccaggctggtcttaaattcctgaccccaggtgatcagctcgccttggcctcccaaagtgctgggattacaggcgtgagccaccgcgcccagccttaaagcagttctttaagtcaccattttaagtggaaaaccagcctccctggcatagatggaaggaagccttcacatccaacaagggggaaagcaggctatggggtcccagtcgagctgccctgctgtctgtgggaggcactgggccaggcccgccttctccaagttataaggaggactacagaccacagagctgtgtggaagagtccccagcccccagaaaaaaaaggcaaaccacgctgtgggagcagtcatccgcacacctgcaccactgacaaaggtcttgcttctgaagtatacaaggactgaccacaaatcaatacgaaacagacaagcctgaagaaaaacaggcagaagacccaaactggcgcatggccaaagacgacacacaaacagccacccaatacatgcacagaaaggtgctcggcctcagaagtaataagggaaccgcaaatggcaatcacaaccatatcatcatcgcacacgcagcacgtccgcagcggaagggcccgtcagtagtgagctggtgacacgtgggcaccattactcttacagactaaatgtctgtgaccccctctagaattcacggacccgcaatgtgatggggactttggggtgtgattgggtttagataagtcacgaagctggggtccccaagatgggattcctgccgtcctaagaagagatagcacagtgctcttctctgtctctgtctttctgcggatgaggacacagagagacagaggctgtctgcaagccaggaagagggcccttcccagaaatggccatgctcgcaccctcatctctgactgtccagcctccagaaccagcattttagccctccagatctcagtgttctgttacagaagcctggactgacaatgaggtccaggcaggacagggttgcagaattcagaaaagcagaggacgtgtccagcctgaccacggtcacccctggggtatgggcgatggaagggcacccacgtttacatcgagacacaagggtagggactcccacagcaagcggactacgactgcccacggcgggacagagggacaaatccccagtgaacgacctcacagtgaaaacaagtgacccagatctactcacatggcccagataccagggacagctgttgggagagaagccagcacagcacagcacacgccaatcctgtctccatatggctcacgagtgggcagagtcccacgacactgtctggggctgtgtaataagagcctgggactagtaataaaatcaggaagcaactgtgtgcgagaccagccctgggcagagacagttatcctggggagggagctgaggaggcagagggggcgtctgggtggggttgggggtgctgggtccacagggtttgttttataactgcccactggacgtgcggttgttttgtgaacctctctgtatgcttgttacgcgccacacagaaaaattaaaaataaaagcatcacacaggcaccaaacaggatcctcccatctattcggaaggcccggaagaggaaggagtgaagggggactgctggattctgggtctgacctgcaaggtcatctcccagatgcctgccctgggcacccactgtgtgagccttggaggtgacacagactcagggggtgtgagacacagggcaggggccactggggacaggctggaagtgggaacaagtggctgcctgaaggccccaagggtgtctccggggcaaagccgggatgtttcaggtgctgcaggaagaagccgggcaccctgttcacccagccagggtctcacttggcacaaagaggcctcgggagaatacacagaaacccctgcttttttttttttttgagacagagtctcgttctgtcacccaggctggagtgcagtggcaggatctcagctcactgcaacctccgcctcccaggttcaagtgattattgtgcctcggccccccaagtagctgggactacagggcgtgcgccaccacaccggctagttttttttttttttttttttttttttttttttaagtagcgacggggtttcaccatgttggtgcagtgcagtagtgtgatctcggcccactgcaacctctgcctcctgggttcaggcgattctcgtgcctcagcctctcgagtagctaggattacaggtgtcatgttggccaggctggtctcgaactcctgacctctcaggtgatctgcccacctcagcctcccaaagtgctgggattacaggcgtgagcaactgtgcctggccatagaaaccctgagttctaatccgcatttgccattgaccagcgaggtgatgtccccaggtgttactgtccccctctgtggcatgggctgagctctgtctgcctccctgggagcctgtggctgaggtccagggagatgctgggtggggaagtcaggactcctctggcttccccatctcggtaaatgtcagggcctctgcccagagtccttcagccccggggccagggcccacgctccaaccgccactgctaagagccctcccgctattgggggctgctgtcctgcctcccatccatggacacaggaagccacaggtggtcccctgcaggctgagctgtcagggccagggacacgaggtgccactttcagcttttggtcccaggtcctgagcacaagtggtggcttcccaggagggccatctgcagtgggtctctgggtttccatggggtgtcctgaggcctgtgtgcctgcagctgctaggcccgtaggatgcctccgtccagcacagacctgatttctgggtagcctgtgagcctccgggaggacccaggctatgggcccaatgggcatggccaggaggggacaggagacctgcacaccacacaggacagacccctgggggcgcctgggccccctcctaccctcgtccacacaccatcttacccccagacttgaggaggcatgaggtttgctgctaaaagtgttggggtgacccgagggggaggggccctcactcatcaaagcagatctctgctttaaacctgcattgctccagatgccccccaaagctctcctgtccagggtggtggcccatccccttacctaactctcctctctccaaaagtctcctctctccttttttttgccagctggccctgctccccacaaccccgccaagctccatcacccgctcagtggagcagaggcagcctgccggttgcagggagaggagtctgttcccagtgaatgccactacctctgtctctccagcaccccccaggggctgggcagggcctgtcagtggggtgaagggaggtctctagagggtgttccaggtggccggagctgccgttagtctcaggcttccaggtggtgctggaccctgccacaccttccaggggctcacatgttccaggacagggggtgcagtgacaaagcaagagaggtaacagcggccttgggcatcatcccccatctcgggcaccaggctgcccaaacaaaagccgagattaatttgcaccaggtcgagggagtggacatggggatgctctgtccgcttcagggactctttggtttctaagcaggggctcaaagaggaggggttccactatcagctgagggtggtcgcctgggaccactgatgggctggtgtcctacctgctatgcacagatgggcccgggaccagacctctagcagtgtagaggttcccacactgcagcccaagtctcctctcagggtaagcgggaccgtgccagaatttccaacaaacaccaggagtaactttcaagtggaaacacagctggcacgggcagcacagggcttataaatgacggggcaataaagtggaattatgacctttgcacctgtcctttgcttctgtgcctttctcctctgcagccaccctgggctgtctctggcctggcctccttttacaatggagctgggggtaggacagtctattagaccaagcctcacaaagcagggaagcagatgggcaggggctgggtggaggtgagggcagagcaggagtgacaatgacctgctactgtagccacagtgccctgcatggccagagccttggtggtgctggtgttcccaggtattactatcaggaagcccattccatcagtgctgttggtaacaattcttgtatgcgtatggacttttatacctttacattcttctctgtgagccactgcaacaaccctgcagggcgtgtctatctgcagggcatataaatccaacttacagatgagaaagctgagacatacaagggtaaaataatttttctcaagggcaccaagtgtggtgttgatttctttacatcaagaggggatgtgaggaaagaaatgaaatttcaagaactagaaggggaaagccaggaacctcctccaaacaaagggaaggctgcacagggctgggatgaggaagaatatttgttcatggccagagcagtagcgttcaccaaggtggagtgccagacttgactagcatcatccctttatcatcttaaaacctctgacaccatcaccaccagcatcattgctagtcacatcactaccaccatcaatcaccatgactatcaccatcaatagaatcactaccatcatcaccaacaaaaacagcatcaccactatcatcaccatgaccaccaccaccagcatcaccaccagcatcaccacgaccaccatcaccagcatcaccatcatcaccaagatcaccaccatgagcatcaccatcagcaccatgaccaccaccaccagcatcaccaccatcatcaccatgaccaccaccagcatcaccaccatcaccaagatcaccaccaccagcatcaccaccaccagcatgaccaccaccaacaccagcatcaccaacatcatcaccatgaccaccaccactaggatcaccactatcatcgccgtgaccaccaccaccagcagcatcaccaccatcatcaccatgaccaccaccaccagcatcaccaccatcatcaccatgaccaccatgaccaccaccaccaccagcatcaccaccagcatcaccatgaccaccaccactaggatcaccactatcatcaccgtgaccaccaccaccaccagcatcaccactgtcatcaccaagaccaccaccactaggatcaccactatcatcaccgtgaccaccaccaccagcatcaccaccatcatcaccaagaccaccaccaccagcatcaacaccatcatcaccatgaccatcaccatgaccaccaccaccagcatcactaccatcatcgccatgagcaccaccaccagcatcaccacgatcatcaccatgaccgccaccaacaccaccaccaccataaacagcatcaccatggctgccatcaactacttatcatcattaccaccaccaccaccacccctggtccctgactccaaggccacaaaatcttaacatctcagaggctggctgaccctggggatgctccagcctccaggtaaaggaaacagatgtcagctcagatgtatctatgtttaggtcctgggccggccacccctgcttctgagcaagtcactcaccatctctgacctcgtgtcaaatggactaacatcactgcatgcccccctcccaagtttactctgaggatcacatgagttacctataaacatcaaatgagaggtgagaggatgcaaccacagggacaaggtttggaactgtgtgctctgaaaaggctggaacgataacgttacatggcctgcaggatggcggaacatgacttactccagtgcatacatgatatggctcccgagggagagcaggtggatcccagaagctgacctagtgttgaactgggaggtgtgacagccaagaggacaggtcccccaccagggccattgtggatgaggactttcctcattgtgtcgtcttcttatcaatggccacagacaagaaatctcaaaggacagtggccccaagtcacttgtgacttcagcagcttccctttatccatggtttcactttctgaggttttaatcacccacggtcaactgaagtctgaaaatattgaacagaaaagtccagaaataaacagttgaaaagttttcaattgcatgccattctgagtagcgtgatgtcgagtgccgttccgcccgggggaagtgactcatccctttgtccagcgcactcctgctgtccacaccacccactggttagtcacttaggagctggctctgatatcagaccaaaaacatggtgtatgcagtacagggcagtacagggttcagcgctgtcccccatttcaggcacccaatgggggtcttgggaggtagcccctgaagataacaggggactgctgcagtcacaaaagagttggtaaaaccaagaggtccccatccttctcctgcccagccctgaccccagggttggatttgggaggaggagatttaaactccaagtgtgtcctgaaaccccgacgaggccacacagggtgtcctataggagacaggaggtgacggctccaggtgtggcttcagatgatagaggagcaacgcactgctctcaggtcgatttctgggaggaggaaacacatgccagcctcaccaccaccctgtcgggtccacacgatctgaaggagagatccgagaatgttatgcccattagtccttggggtgtggggctggtggcggtccggagacacttctcagagcaaatggcaatgctaagctgtaagatgctcccagtaagggccccctacgctggtaaattagagagtggctggaaaggagagtccacggcagggattctgaatgggaacagtccatgggaagagagcttgggaatctggacagcctggcacacatgcttcccagacatacacaacacgtgtttccttatgaataagcggggatcataaaggcacctcccattaagggcaattacgaggctcaaatgaggtcctgtctcttctccattgagtgccacaaaaaagtagaaaagacacactgcaaaccacatctgtttcctggtcagagctctgactttctgatctagatcctatgcttatggctagcttctagaaacttctagagagccatggggcctattcttaaatgcagacttaccccacaagagtggccagtcaagggaaggcacggctaatcccatcctacactcacaccttctacccagtcgagacccctgcaccagggagtcagccagaagattccggaagcccattctgcagagaatcccatcaagtcacttcctcggtggtctctgcagctgattgaggatcccgactccaacaggctctggtggtgcatacggcacaggacatgccaaaactacactgggtaggtgctgctcatctgggtaggtgcccaggagtgaagtaggagttgagaatgtggcatcttatgccccagtctgagctgcctggctgtgaggcccccactcctacctcagtggctttcaggtgaccagatcctacctgtctctggaggatggaaacagggatgtacagcggtgactcatcacacccattttctcatcatgttctacatgaatggtgctcactgatagtcaagtcttttgtttgtttcagcaactaaaatacgatttgctctggtgctgcttggccttgtcattttctcagggataaacagagagccctggcctgacagtttccatgtacacataagatgtgtcgctgaaaactgcacacacgtgcattgcattcatttttcataaactgcctcatccatgggtgccaactgattacttcggaaatattttatctttgtttcttagtcaagatacatcaacaggggcacccctgatttcaatgtgtagaattctgaggaggaaggatcaagtgattctacaatccaccagcctgaattcacagatgaggaaattgatgtcttggaagatgcggaaggcagtcaagtccccagtaggggaggtgggcactgtctctccacccagggtgcatgtccacccagggcactgtctctccacccagggtgcataaagagggtcagctttatgggccaacggaccaggctatagcacccagttatgcagccaagcactagcctaggtgttgctgggagggtattttgtagatgtggttaacatttacagtctgttggcttgaagtcaacatttttctcagtaatgtgggtgggcctcctccaatcatttaaaaggcctcaagagcaaaattgaggtttctttgaggaagaagagattctgcatcaagtttgcagcaccagctcctgtctgggcgttccaggctgctggactgcccagaggattttagacttgcctgttcccatgatcgggtgagccaagtccttgaaatgagtctcttaatacatacgctctatctgtatctacatctgtgtctacgtcctactggttctgtttctctggagaatcttgactcaaacagtcaccaggaggtggctcctggcccgggaccacaggtcccagcatctgcagcatccaggttccctccacagggtgtcacgggcgatgatgtgtgtccctgatgtgccagagcctcacacaagagggcagcgtttctccattctctctccccgtctctgcaggctgggggcaggggaccctaaggtcctcgaggatgaccaggccacagaatggaagggcctggactgcttggtcacatcatggagaaaatcagcccgtctgctgaccagaagagaccacactgggtggctactgggcaggaaaaaaacctgcactccattaagccactgaagttgtgggttcacttgtcgtagcagctgacattgagctacctaatacaaatgggtggaaagctttagagtcttgacaaaagccagaccttccaactcctaactgatcaagtgcaacaccacccaacctccttttcacaaacgcggtgggccaactgacatgcactctgtcctggataggcaccatgcagggcacaggtgtccctgccctcagagagcctaaactccagcaggatggggtgaggacatgcatgtaattaagcaccaattttctagagcaccatcttccaagatgcatctcctcttgcatataataacaacatagtcatatgtggcacttagctctcaggtctctgggctgatgcatgcaaagaagtgagattttataaatctgggcatgcctctgtctcttacgcacagaaacaaaaaagctatgatcataaacttccacccaactcttcatacgcatcatctccaggcttcacatttcagataaagaagtctactcagagctagccagagacagctgagctgagaatagacccggatatgtttctgtttccccattgcctcaggtggatgtgcaggaggattaatcactggcagtcacaccaggatcaccaccctgatcactgcatgagaaacactgtcctgatgcaggtacaggtcacagctcaagcatcagtagttacaaataatgggtcatagtccctgcccagtaactccctatctgtgtgctccgacatgctgagatggggatgctcatgtgtacaatgcaggtgatgattcctgccctacttattccagaaggttggatgagacagcatgcaggaaagcccactggagactgtgaagtcccataaacatgcagccttaagaaattacaactaaggctcaggtgagtaagcccactatatcttgaaggcataactaccaaactattcatggaactaagctgaacttgtatcatttgaccaaccatccatccaaccaacaaaccaatcagccagccagctaaccaaccaaccaaccaaccaaccaactaaccaatcagtcagtcagccaactagttaatcaaccaaccaaccagtcagccagacagctaatcaaccaaccaaccaaccaaccaactaatcagtcagctagacagctaatcaaccaaccaaccaaccagccagctagccagccagccagccaagcaatcaatcaaccaaccaaccaaccaaccaaccaaccaaccaaccaaccaaccaaccagcaagccagctagctaattaaccaaccaaccaaccaaccagccaaccagccaaccaaccaaccaaccaaccaaccaaccaaccaaccaaccaaccaaccaacgaggaccaccatttgattttgctgtttgttatccccaacctccagcaactgtcatgaggctatgagaattcactgggtcctgagcagccacttctttactgagttattcattctgtgagtcactcacttatttcatttaatgttcatgaatggagtttaccaactaaatgttcattttacaacataaagcaatggtgctccataaaagagaaacagcttccaagggtgcaagcaaggtctactgtgtagaaagagcttggtggatgggaacatctaaaaacattttgtaccatcttccagattctatgtatatccaaagtcttctaattttcagcatcaaaaaaagctacaaaaagggccaggcatggtggctcacacctacaatcccagtattttgggagaccgaggcaggagggtcacttgtgcctaggagttcaagaacagcctgggcaacatagtgagaactcgtctctacaaaaaaatacactaataaaataaattttaaaataaggcaggagaatcatttgagactgggaagtcaaggcatgtaatgagccctgatggcaccactgcattcccacctcgatgacacagcaagaccctgactcaaaagaaaaaagtgacaaaaagcactaacgtggaagaaaaaaagaataatttggattagattcaaaattttaaaaacccttctactcattaaaagacatacagttgacccttgaacaacatgggtttgaactgcatgggtcaacttacatgtggatttttcaactaaatatagattgaaaacacaatattcgtgtgaaataaaacctgcatatacagagggctgacttcacatacacaggttccatggagatgactgtgggacttgaggtggattttggtatatgatgtgaggtggtggtgtcctggaaccaatccccacgtatactgagagatgactgtagttagaaaatgaaaacgcaagtcacaggctgggaaaaatgtttgcagcatatatttgacaaaggactgataaacagaatatataaagaactcctacaaaccaataaggaaaagatgaacactgccattaaaaatgaaccaaagacttaaagaagctatacatacagcaaatgagcacacaaagagatgcctaatcatcatccccagaaaaatgcaaattacacccacaataagatatcatttcatatctattagaacagctgaagttaaacagactgatattgccaaatgttgatgagaaagtggagcaactggaactctcacacactgccggtaggagaacaaaatgggacagcactttggagaactgtgtggtagtttcttataaaatgaaaatgttatcatacaacccagcagttttctacctagagaaataaaaatgtatgtccttaaaaagactcacacaaaaaccttttttagcaggttcattcatattagccaaaactgagaagcaatccacatgtccatcatcaggagaatgatcaaactgtggtgtaaatacaccataaaacactagccagcaataaacatttataaactgctgtctgggcatggtggatcatgcctgtaatcccagcattttgggaggtcaaggcaggtggatcccttgaggtcaggagttcaaaaccagtctggcaaacatggtgaaatcccctccttactaaaaatacaaaaatcagccaggtgtggtggtgggagcctgtaatcccagctactagggaggctgaggcatgagaatcacttgaactctggagtgggagtttgcagtgagctgagatggtgccactgcactccagtctgggcaacagagactccgtctcagaaaaaaaaaaaaaaacaacatataaaccactgagtcctgcaatacatagctgatatcacaggcattaggctgagggaaagaagttgggcccgagagtacaagttgcagggtctcatctacatgaaatccagtgataggcaaaatctatggtgacagaaatctatggtctatggtgacagaaatcagaaccacacttgcttccggtgtgggatggggagggatggctggaagacagcctgagatcacttcctggggtgaaagaaaggtgtttttaaaaattattttatatattttttgagatggagttttgctcttgtcacccaggctggagtgcaatggtgcgaccttggctcactgcaacctccacctcccaggttcaagtgattcttatgcctcggcctcccaagtagctgggattacaggcatcaccatcatgcccagctaatttttgtattttcagtagagacaggtttcaccatgttggccaggatggtctcaaactcctaacctcaagtgattcacccgccttggcctcccaaggtgcaaagattacaggcatgagccaccacacctggcctgtgaaggaagggtttaatatcttatttgcagttggagacgtgggtatatacatttgtcaaaatgcactgaactagatttttcttataatctgtgtgttttcctgtatgtaaatcacacctctataaaagaagataatacaaaagaaggtgctaagtcacgatcttagaacacccaagggcaagcagaacccagcaggaaccactgtggaatcctccccgccctcctcgactcctctgtgctgtgatcttggtgtacctccttccatcccaggtcacagagatgccttccttccctgacccacagcctttgtgttagaggagagttctgatgttcatttttgccatctgtgttagggagaaagatggctcctccctaggatgcccaggtcctaatccctagaacctgtgaatatgctcccttaaggcaaaagggaattaaggttgcaggcagaattaaggcggcccatcagtttacttgacctggattagcaaggtgggcccatctaatcacatgggttcttttcttttcttttttcttttctttctttttcttttttttttttttttgagatggagtcttgctatgttgcccaggctggagtgcagtggtgcaatctcagctcactgcaacctccgcctcccaggttcaagcaattttcctgcctcagcctcccgaggagctgggactacaggtgcatggcaccatgtccggctaatttttgcatttttagtacagacagggtttcaccatgttggccaggctggtctcgaactcctaaactcaagagatctgcccacctcagtctcccaaagtgctgggattacaggtgtgagtcactgcacctggccataatcacacaggttcttaaaagtggaagaagaggaggcagaagggagggttggagagatgcaatggaagaaggaccctaccaacaggtgctggctttggagacggaggaaggggccatgagccaaggatgtcggaaaggcaaggaaacaaattctcccccacagattgcagaaaggaatgcagccctgctgatgccctgactttagccaagtgagactcacacccgcatcagcccaggtagaaaatacggttttatcaaggacattgtcctgggagtgtgagctggagcaagatcacccttctagaaacctctgtcttaccccttaaataacctcctcccacagtaaacacaaacacaaaccaccgcccctctggaagctgcctgcacaggatgtacattttctggcagactccacctcgcccacctgccctgggtggggaccctgtcaacggggctagagaaagccatacgttctcatctagggcacacagggtgatgctggcaggtggacgggaaaagcccacaggagagaggaggaagacaggttgctccagctgccctgcttcctcctgcacactatcctggaagccgctactctctggaggatggagagagcaggaagctcaaatgatccccctacgcagcagccctccaggactgccccatccaggtgtggcatagccaacaaagcccggtgctggcacagttgagtccttccaacaaaagagtagagggagggcagccagtgtggctctgaaggtgagtgccaggagagggaggagtggtggctgctcaggaagaggaggactggaggacagggagaaggaaggcattgagcaaccctgggaggcaagctgagctccagggcctggcccttctcagacaagtgaggcaggggaaggttgcttgcaggagagggtgggtgtggaccaggggtggacgggcaatggcagggcttggaggtctggcctgtgccagtgctcagtgtgattgctgcccagtgtaaatcccgtgtggtctacctggttcaactctgcttatcttgaggcaacaggatgcctgaggtcagaagctccccctggtgaccaaaaaggctaagactagtgggatccaagatggcagctcacttggcttctgaagaacctctaacctcattacagtctgatttccatgctaaatgaccctccccccagcaccaggatagttgacaatcaccatgacaacaacagaaagaaaccgtaaaaggacagaaaggaaggcggcacaccggttctgagaagctctctgcccatttccagaaaagacatgaatattcctccccttgatttaatgcccaatccctttattacagaggccccagctctgtgacttcccagccctcgggagctgataaatggatctgtgagccaagctcccgcttctcggttccatggccaacaaataaagcctgtgctgcttgaagctcacttttgcttttggatactggctgtgtagcacacaacagagaaagaccccattcttgggaagaccagctttgttggtaacattgtcatcgccacatccagaaaaacacactccctcccacccagccttccgagtggagcacattcccagcttctccttcatagttaagtttgggacatgtcttaactcaataccccacaataccgtctggtgtctaagcctgagcagggactcatcagcagggaagctgatgcacgaactgagtccccgttgaagccaagatctcagacagaaaacctactgagcctccctgctagagactgcaaagccagccaggtccaggacagactcctccttgctttccagaacacacgtttgtagggcctggctggccctggcagatctgatcaggcggcagagggctacctagtgagcccacagactaggaacctcaaaaacagggcaatgggcccgtttggacagagctcagaggcggcaggctccgcacaagaaggcgtgcatggttggtggccgcagcgtccgtggccacttgacacgtgttctgtgagcctgggattctactaaaagccagatgccgttcacatgcggactgctttcttcttataagacacttaaggcttcacttttcctccactctcatacacacacacacacacacacacacacacacacacacactcggtaccattttatataagtggtctcctcttcacattttaatcagttcaatctctcggcaatcaattttgaaacgattttcagcaagtgctatatctggaggttctaagagagatgctggaatggcttcccgtcggaacactgaactctttcgagcagtttttacggaggcgtttgctacgtgttctcagggcggcacaggagcatctcgcctgcacatgggaagctgcctgttttatgccatcgatagaagagatcgaaaaagaaatctaatcaacccccaaaagtctctctctgatggctagaacatacggtccaggttttctgggacgtgtactgagcagccttttaactaaaagcttccacaccatcttgtaaggaatttctggtttggatgaagcccagaggaatgaaagcaaccaacctgtttccaaagatctagaaagtcctgaattcgcaactcagcctccctctacgacgcaacggccgaatcttgccacggacaacaccgaccacgggcctgagataggcctgcaggatcgagggtgggcggccacgagcgctcgccttacctgcctggctgtccctgggcttacactggacctcctccacgcactccgccggaaaccatccgatgtggccgcgggcgctgccttcccagaagcccccttcaccgatgctcagaactagagacgacaaaaagggagaggtgttagcaggggggacgtggagggcctgaggttgaacaagacgagtggggctgggcagaggcaggagaatcagcgcacccctggccaggcctgcagagcaagcggctctggtgtgactgcacttccttcagctgctgacagtgctaagaggcaccggggcatcaccactgcagaccacaggtgccctgtgccccttaggtgatgagacaggaatgaagcactgacatgtttgcatctttacgtatctgacaccacgtcatatgaatggatgtgcacggcggccctgtagcatctctcagtgttgcacatgagacaggacagtggtgcttggctgtccttaccatcaatgatttcagatataaaagtggagtcggggggcaccgccacaaagcagggaggaaatgatgaggtcgtaccttcccctcctaagctgggcaagaaccggaggcagatggcctggaggaaagaaaatccacctgcccggctctgtctggatcttctaaacaagcgtgcggaaggagaaatcacagcagaggtctgggcgcggtggctcatgcctgtaatcccagcactttggggggccgaggggagtggaccctctgaggtcaggagttcaagaccagcctggccaacatagccaaaccgcgtctctactaaaaatacaaaaattagctgggcatggtggcccatgcctgtaatctcagctactcgctcaggaggctgaggcaggagaatcacttgaacccggaagatggaagttgcagtgagccaagattgtgccactgcactcacagcctgggtgacagagtgagactccatctcaaaaaaaaaagaaagaaaaagaaatcacagcagaggatgggcgagcagctcacgaatcatctgacaatggtgtggacgtggaattatcttcacttaaaatggaagaaactgcactaaaaacctcacacagtcagcaccagccccttggaggcctggcccacaggcatgctggcttattaatcaggaacctattcattacgtggttgctggcaaggactgcagttttctttctgacttgtggttgaaagaagccaattccccaggagagaagggatggtggccacacagtgaccctgtcctggggaccacgcacatcactggacagacacggccaccccagcctacagggtggaagttgctgagtccagacacaggcatccctccccagcccatgtactgggtacacagtaggccctcaatgaacatccgctggaagaataaagcatgtttgtttttaaactcaactgctgagcatgggtgagggacataagcccaaagacaccatggggtgggggcaaggtcaggaggaccccgccggtccccatggccctactgtgataactatttctgtcataaagcttgcagtggcaaagtgaggaaggaaaatctttatatcttagggttttttttttgttttttgttttttttagaggctttgtcacccaggctgaagtgcagtggtgtcatcacagcgcactgcagccttgactcccaggcttaagtgatcctcccacctcagcctcctgagtagctgggatgacaggcgtgtaccacgacacctcattattattataattactttttttagagacagggtctcactatgttgcccaggctggtttcaaaaccctaagctcaagcaatcacctgcctccacctcccaaagtggttcggatgactggcgtgagccactgcgccggtctgtatcttacttaggactttggtgctgggccagggatgccctcaacaccttcactccctcctaatgtgtctaagcaaggaggaaaacaatctgatttctccacatctttaccttcttttaaattactcaggatccaaaggcaacagccctgctgaaagaggaattatggccccataagtgttttcctctagccctcatttgaatctcaaaggccagacagagaaccactcagcccacgatttttgaaggttaatggaactgaaaaccccactttataagttcctaataacctgaagaaatgacctaactgaaacagatcagccacatcccaggtgaccaggacaatcatcactgcctgaagcatctcctccaaaactcgatgcagggcctgtgggctcctctcagcccagctggccgggatgtgcctcacagtttcccagcagaaccctggacctgagagggtcatctcagagcagtaaccccgggctgcaaagggaggccaaggacttgctgctgcgccaccaggagccagtgcccacagatacccacactctccttccttcacggctgtgaggtcattctgctgttttatatgggcctggggagaagggaactgcataggtagagattggtatcatcttccatggaagctctgccctatcttagctatgtgatgcttgggaaaactcggtctctctgtacctcggtttcctcatttatcagagcatgacaatactatctagctcataagtgtttctatgcgtgaatcggaggcacgtgagcccagtgtggaatgaggactcaacactcctgcctgactttccttccaaactcccctctccaggagaatcacaccttttagttccatatttaatctctatgaagtatgcacttcaggatgtgttattgttattacaagaccaaccaaaaatatgaaaggctgtttccaatgggcttgtacaaggaggcagaggtgacgtgctgcaaggggtccccccaacacggggagccttcatgtcaggggcgtaaaaagagcaggacgtgtgccgagggtgcaggggaatggaggagggggccccttctgggtttctggttgtgcaaatggtacctgctggtcctcttcagagaatggggagcaagagaggggtttgtgccttgagtgcctccctgacagaacatctgcgtccaggtaggaatgagtgttcctcatatggtgaggaaggggctgggcttggctaccccattgtttgctgatgcaattcattcaaaagtaaagactccacaccctgggtaagaagaggtggaggagaagaggaagtccccatccacccagcagtacaagagcgagcactgggctgggaggtgagagacttggccccatcactgggatgctgagggatcccggggactcctgttctctctgtggccccacctactccatgtggaacactagggtgaattctgagagtgaattctgaccaggcaaccaggggaattctggagtctggagtcctgccttgctcttgggtgctctggctagaaaaattgtcaaggaccctgtccctggagccccagacttgcaggggaatacggtgtgataggactgactctaccacagaggatcagatgagaatcgtcccagccaaaccgaggggcaggaggaagactacggaagcacagagggggtgcggcgagacttggggcaaccctgcaggaagaggcagtgctttgaatggtgggtagagagcaggtgaaggcactgcacccagggcatgaggaccgggagaggggcacatacggcacggctgggggccctgggaaacctggctagaaagaaggttcatcctcaacaccatgtctgctccaacacagacgatgctttaaggcacctatgaaaaccaactgcggatctctctatgggccccacatgcttcctgaggccacagtggggataagcttgttggagaagggccagctctgctgtcctcactatggccaccacagtgggccgctccctgcctcagcagctctcttgcaaactggaaagcagcggtgattccctgtactggatgggtcaggggtggctccgaccccgctgctacactccaccttctcccccttgaccccagcctgggtacagaaacctgccaggtcactgcggaggagggaggaaccgagacccagtgtttctcctgttctgtacccaacatgctggtttctaatgtacctctaggccatcttcaatttcaaaccatgcatggtgttcttgaatccacatatccttctgcttaaattgacacaggacttacttgggtcaaggactgtgctggtgtctggggtcacaaagatggtgcaggatttggggcagacacctggaggagcttcagaaaaggaggatggccttactgtccacctacctaatgtcacagagcaaaaacgctggcgccccctgtgcccccaccccccagcattggcaatgctatgtcatgggcttagttttttgcttgccagaatgggggcttgcagtaagcagggtcaatcatcactgcttccctaggcctcacccatggccacgaaccctcaggggttcactgtgtgtctgttaaataaatgaacccctaaaatgaccacgctcactgtgctacgtgctgcatcagaggcctgtgtggcctgggccaaaaagtagagagggagcgtggcaggtgggggcgaggacactcccagaggaagggacatggcagccgaatcctgaaggaggagctgatgggaagacacagggatagctgctgtttgggcagaggaaaagcaggatggaagcatggtggtgagagcgtgggacaaaacacacactgctatttagaaaactctgtcattctttcacgctgccatgcactcactcactcaccacctatccaactacccacctatccactcattcacccacctatcaaactcaaccgcacatccatccatccatccatccatcttccagcctacccatccatccatctacccatccatccatttacctatccatccatccatccacccacccacccagccatccagccatttcatccatccatcatctatcccattccaagcactgtgtcacatgcttgggaaacaaacaagaagaagacaaagtcctgcctgcagagggtctacaatccgtcacagtcaggaatgctgcaaaatcacctgaggagcttgttaactattcagattcccaggctgtgtccttggagacacaattctgcagatgtagggatggatggccaggagatctgcacatttaacaaactcctctcatgtctcagatgcagggacttcgggaagagaggctgagaaactgcactcaggtacacagcttggacaggagcctctggctcaggagcctgatgctggatctcgcataaagaactatcgggagtggagggaagaatgtgccaggcacagtgaaggacaaagaagagcccttgaattaaaaaaaaaaaaaaaaggagcgtcagtgggggaatcggaacatgtacacacctatttttgggcaccccttattttagaagaaaaatgttggggtatgttttcccaggtacatggtatgcaactgtctactgggaacgtcaaccccttcccaaatgggaccgagcggaggagatgtaaattaaccttctgaaagagccaggagcagcagtgttatcagcaggaccccagggccaccctggggcccgtcacagccaccctgcctgcctgctgcccagacccgacttccactgcaaaaaatgagtttggtttctctggaaaccctcccagacctgcccctgccagccaggcagctgggtttcctgcccacaatgattgttcccttgatatcaaggggacagaattcctccaaacggccttggctctgcaggcagtggatcggctcgacccgcccgcctctaagcactgccatgcaggcagcaaggatgtgcgggccaccccacgatggggaggaggcaccgacagctcggcaggaaggaagagcggtgccactggcagcaggaaggggctccgtgccaattgtgtgcaaatggcctgcgcggcccactcgaatctcttttcagaacagcagtcctttgccatcgatcctttgaagtgtgagttttggaaccgagctctgtcatttctgttctccctgggagaaaggcccagctccccgcacgccccacgctcctgcgaggggcgggttccagtctggtcatgtttgaggaggtgctgctgggttccagtgtgctggggaggggcagagaggctgaggaggcccagtcctggggcctggataggagtcacgtgacctcccttctttcctttgttgaatcattctatcaaacccagggagttggacaggggaaggcccccccagagcttctgggaattaaggtgtgagatgtggattcgcctgccatgtcccaggacccctgcgagtcctgggtcctcaagtctgcctaccactgccagcctgtgggagactcggatccactgatggggctcatcaccggctccccctctcccttgagctcctgctcatccatgctgctactcagggtcccctctaagggactctcagctgtttagtgcccactcccatgggcctctgctctatgtctaagggactggggacatgtgccaagttcacagcatgggagcctgtctgcagctctgcccctctcggagcatgggtcagtatgcctgagtgagtccacagatgcccagccccaggctctaggttcatcttcacaggcctctctgcccctttggaagtccaggactaacctggctgccctacaggaactgccagccgcaccccagccttctccttgggcatcagtgagctccaaagcaggactcacagaggagcagctcccaccctccgacccctgagccccaggcttctcctctttacaatagggacaggcctggacaagaagaccgtgtgtcccttcctgctctggagagacagtgagcttccttggctcccacttgggcctagggggtggccctgagtgtgcagaccggtcagaaaacactctctaactaggaacttcagctctcacttcctagaacggggttgctaacaaggccggcatcggccctgatccctgcacagatggcccctcttgctcccccactgcggggccttaacatccttgtcacccgacatctcagggctggcctcagtggggaggagggaaggtggctctcagcactagtcctcagagagacagccaagttgatggggtaagtgtgaaggattttaaagtggcaattacaccaacctacagtgttgtaaaaacaaaacaaaaaactaagtttttaatgaacaaaaaaatctcaacaaggtaataggagatcttggcaaataaaaggcaacaataaaaacagataaacagaaaagctagcaaacatgatttatgaaattataaaactcaaaagacggacttaacagctacagggacatttcaaaggaaagggtaagtgaacttaaacaataaccaatagaaatgatctaatgtaaagaaaaatgactgaaaaaaatgaatagagctccagggacttgtttgatgctatcaaatgatgaaatatgtgtgcagcagaaacactggccatcaggcaagagggcggggctctgccatcattagaatgttgcagtaacccaggtcaagctgacctgatcagtgtgtcgcgcagagaaaggaactgagtcaattacctgctgggggccaggaggcagccagctggggaaggcgggatttgaaccgggcctactgacctctaagggccgcaccttccacccatgccactccaatggcaacctgccctccaatggcaaggccctccaatggcagggcccggcatgctgccctccaatggcggggcccgggcatgctggccacgtgtgctaggcctttcttgctccacccagtgagttcctaccaccccacacaacctccgcagcccacacctgccatgttgcttctgctgtgtgcctcagatgacaccactgccaacttccctccaaccctacttttatcttcctgcagtgcttcacacacctgacttccccctgggcagaaaccatcactggctccccaataccccaggaacaatgtctaaccccttcttgacctggtgttgacaatggcccccccagaggcttctcaacgctggttctcaggattctgctttgagaatctttccttccaacctggtagaattccttcctttgaacactgcaggccccgggcctcaggtcacaccggaccatctacctggagaccccaaagccgacccatgccagggcccaccccgacacttcagacttaggggatggaaaggagctctgctcttcgatgccctcatctggctcccccactgcccttctcaagtggaatctcattcccagtggacgtgtccccttcgatccctgagacccagcactggggaagccgcagcagctccctggagagtgagggaaagggtctgggaacgtcactctgttccccattcctgcccttccaggggcccgtgttttccatggagaagcacagccttggacatcgtccccacagcaggccgggtgaagggccccagcctgacctcactccaggagcggaggacaaccagcagacactgacctttgaccctgtcaccgcggtgaagggggatctcgccgtccacttggggttggtatggcttgacagcgacgaagagcctcccgggcacggcactgtagagcttccgcttgggccccgggtactcgaaggccgagagtgagtccttgttggcaccaagagcaaaaggcgacctggaccaggtgagaggggcagagagagagagagcagagtcacaaggtcacaagccacatgccacaaaccacagccaagccattcaacgcatgctgcgcctcggctggccgcatcagaactcctgatgccagacaggaagatgggaacaggccggggcagcactgtggtcagaggctcaggcagatccaacaatcccactcgcaggtctgccccgcacagacagaaagctgccactcggggagacgtctgcacacctgcgttcacagtggcaccgttcacagcagcccaagggtccctccacagaatggagagacacagggtggtccaaacatacaatggaacgctgtttagcctccatcaggaattaaactctgggccaggcgtggtgggatcacatctgtaatcccagcactttgggaggctgaggtgggcagaccacctgagatcacgagttcgggaccagcacggccaacatggtgaaacctcgttggtactaaaaattcaaaaaatagcagggtgtggtggtgagcacctgtaatccgggctactggagaggctgaggcaggagaattgcttaaacctgggaggcggaggttgcggtgagccaagactgcaccattgcactccagcctgggtgacagagtgagactctgtctccaaaaaaaaaaagtaaactgtgacacaggctacaccatgggtgaaccttggggacactgctcagtgagatacaccagacacaaaagaacacagactgtgtgatcccagccatgcgagggcccgagagcagtcagattcatggacacagaaagtagaatggcgggtgccgggggctggtggagagaatggggagtgagggttcaatggggacagagttttggtttcacaagatgagaaggttctggagatggatggtggtgatggctgcacagcactcgaatgtattccactgaacgccactgaactgtgcacttcaaaatggttctaaggtgataaatttgatgttacacctatttctccactattttacttcattttatttatttatttgagacaaagtctccctctgtcacccacgcgggactgcagtggcatgatctcggctcactgcaacctctgcctcccaggttcaagcgattctcctgcctcagcctcctgagtacctgggattacaggtgcccgccaccatgcctggctactttttgtatttttagtagagatgcggtttcaccatgttcaccaggatggtctcaaagttctggcctcaaatgatccacctgcctcggcctcccaaagtgctgaagttacaggtgtgagacaccgcacctggcctattttgccactattttaaaaaagactagcctgggcaacatgatgaaaccctatttctacaaaaaaaaaaaaaaaaaaaaaaaattggccaggcatggtgctgtgcatttgtggttctcgctccttgggaggctcaggtgggaggattgcttgtggccaggaggtcgcggctgcagtgagccatgattgtgccactgcactccagcctgggtgacagagtgagatcctgtctcaaaaaaacaaaaacaaacaaatcccaaagagactcaggtggagacagaaatccaggaaggccatgggtgtccgacacttcatccacctcactgtgagcgtcagtcacactggacgaggaagcacccagggccttccatcaaaatgggtcacgacctcggttctcccagtgcagttcccagcggccccagcgaaccacgctagaggaactcatatccgttcttgctgtatgtcattgattttgcacagagctatgttttcaacctgacttctacacccgacagtaagacacaccttaacagggcccagagacaggacacgcaacacaaagtactctgagatgcacctacacagtgccaggacgggcgtccttagaaacaaacgcatctacacggaggaagttggccagaaattcaggacggccctcccgggcacatgctcagaaagacagggaaagtgtccacctgcggctggcatcctccaacagggcgcctggctgcagggaagcgagtggtctctgaccatggttcccctcccaaactttaggtgctgtggcctctgaggcgatggaggcagcatcagtctttctatgaggacagggaggaagggcccatgcacacagggacccatgcaaaacaggcttgcagggaaagttctagaagcggatgtgactaccctcttttggcatttaacataagcctccccctgatcacctgccttcactactgtaatcacccgactcatgtgtccctgataattgccttatagtttgctctgtgcttgtataaagttacagaagggcaatggggctgtatttagttctgattcttactccttctctcagcattaggatggtgagatctggccatggggaccttacccatgtcaacgtgtttgaggagccagggctccatgtactccgattactctgtagggagcagattgggcctgaatactcagtctgtctgcctgactccaaatctcagatttgtcctgaaaccatggggagcagagacagggcaggacagtggcctcttctggaacaggtgggcgtcttggatgcttacctgggctctgaggacattgagagatgggggaggctgcaagcagctaggacttccctgtcccctgtccctagggatgccattcctcccccaagtcacagccacaaatgtggcagtcacagactcctgggggcacaggtgtctctgagctgtcactgccatgcagcctgggcacaatatggagcccaccgggcacggtgtggcacagcagtgcatcgatgtgcacagccaggagaattccaaaggaccactgttccccatcgatggacatcatctatccccaaacaccccaggagttcctggagcaggaactcctgcaaaagctaggtttggtggcctcctcttgtccaaaggcatagctcagtgagccaccagggagcagagggaaaggacactgggcacttcctgctctgcaaggggagctgatgaacgcaacagcagcgctgggccaggcccccacctgagaggcttccctgccagcctgcccagccatctgcacgtgtaccagcactcagacacattcaactcagcctgactcaggcagggctggactggcacaggaccgagagctgggaggggtgggagcctgtaccgcaggcactgagcgtctcacggctgtctcctctctggctcccaggccagcagggatgcggggaggagaatcccggcaaccaagggactccaaggagaatacagcaccccagggtcagaatccctcctctccttgaacttcccttaatgcacctgcccacatctgccccgagtgatgaagccagcaaggctggcggccatcatgggctctgtggacggcctgaacctcccgtcactcccaggctgacctgccccagctgtgtgaccttcagtgagtcactttacctctctgagccttaattttcttatttgtaaaataggtggtagagggtgggggtagggcgaatccccaccacctgtggttgctgggagactaatgagaaaatgcagatgagaagctcagttcccagccccgctgcagctccgagggcagtcactgtctctgcattgaccattatccaggctggaccggcagcagccagaacacagggctatgccgacatcatctcaaccccctctcctggccggtgatgcgacatgggcgattggaggagctggatgcattaggccccatcaggactgaaggttagtcctagtgatgaggtcacaggtggccccagtgtcccctgggctgcatggatgctcttcagcaggtggagtggctgcaggtcaggtcagcccagccccatgatcagtccccaagcacccggataggttgactccagggggagcaaggtgaggcttgtgggcttcctcccgaggggaaagggtgggtcaaagtctagaggaaaaatcagatgaacaaggctgacagtagctggggcagggcagagggtgagccacagagcaggagtcacagggtctgttcacaactgttatgtgtctgacacagcagctgcttaagtccagaacttaggaaccaaatgaggagtgcgtcttctcaggatttccacacccaaagagctcctgcaaggaaccccacggccccactgtgcatcctcaacagcagccggcaagggacactgagcctgccctgcttgagaagtcagttaacttcatcagaattaatccatccactcatctcttctttgttatccatccaggcctccttgcccaaatacctgttcttccatccatccacccacccactcatccacccactatccatcatcgatccatccatccatccatctacccatccatccacccatccatccactcatcatctacctatccatcatccatccactcatccatccatccatccatccatcatctattcatccatccattcatccaacatccatctacccatccatccaccattcatttatccatccatctacccatccattcatccatcatctatccatccaccatccagccatccatccatcatgtattcatcatccatcatccatctacccatccatccaccattcattcatccatgcatctacccatccacccatccatcttatcatttttctgaacatctattcactcatctacccaaagttcagaaagatcttgcctgaagcccagctgaacacttactatccatcattggacaagttagctacctctcaaagcctcaacctccccatcaaaaaagcggatgatcaggagtaactgtgataacgcactctgccaggtgttatgcaaacatcagcaccttcacactgccctgctgcagctgcaaagtcagtaacaaagtgcctgtctcacctcactggtccagctggcaccagagtgcgtgtcacttgacagagaagtcaaagtgaacacagctccaaccttgaagctctgtttcttgattctctttgcaggaatcagttccctaacccatcaaccccagagcctggggaacctttatctaaaaacaggaaagccttatttcttctagaccagagtggtgtacacggttgcaggcagtgattaccgggcagtgacatacggttccagccaaatgctcacatgtcttcttattcactgttaatttgaacctcaaaaagtcccacaaaggcagaaggtgaaaacttttgtccccattttacaggtgagaaaatggaggctccataaatggtgacttgggtatggaaatacagagctggtcctcacatcctagctcggggttccctgctctgtctggtgacagaatgaggtgaacaagatctcacctgctacaaggtgtcttatccttgtgatgtctcatttgatgaactacatcctcctgccaggtcccactcttcccacagcagccatagtcagcagcagaagccagacctctgcagcccagggagaagggctgccccgctcaggagacatggcacccgggccacgctgggggtccctcctgctgtcctgcctgcacagtgaggactggtctgaagttcctgcatcccaaactgtccatgttttccttatgttctggccaagaacagccaggagggattctaaccaacttgttttggtataagggccaaatcactgaattcttaaaatgaaaaaattggtaatcttctcggtggggtgacttggatcagtgagttgggccatttcccagccagcctgggtgaacaggaactggccgacatactgacctttctccattcattcattcaccagtcagttacacattcattcattcatccagcaagtactctgcgggtgggctgtgagcccatcgccatgtgggtctgcagacccccgtgaatggtagacacggatgcaggcctcagggagctgacggtcaactgggcagaagcacaggtcagcagatgcatttccgcccatctgaggggtcagcacagagaacagggccaggacttgaggtcagggttagagtccacagggcctacccacaaaaggctacaagaggggacagctgggtagtgcagagagaagggcaagggcacgggaaaggctctgcagggatgttcggggagaaatggatgccacacggcgcagtggtgccagtgaacgagcaccagctcaccctggatgcagcctcaaggctggaccggagcagacagaaggtggaggtggggagccccattgagggcccctgtggccatcccaggggagctaggggagcccctgatgtgtagaattgtgagaaagttggaggtttcaagaggcacaatcacccaggcctgggacctactcaaggtgggtaggtgggtgtgtcttccaggttacggctcacgcagaagatggcagtaggggaatagagaaagctgtcagctcaggtctctggcacagagggcagcacagcaaacgcaggagttcccaagcccttagcgtctgtcaaatgttactaaatgctattggctgacagttgttttaaagttgaaggctcaggtcctgtgtcatctcctgtctggtcaatatcacctccctccctggcttcccaggactgtgaaagtcagcccgcacccaagccctgtgcgtctcgggcctgagggcttcacgctgcctctgtgattctggtgacggcatctctgaggatgcacgacagggacttaggattattcacaatgtctcaccttgctggctgcaatgactgcttcagggacggacacaggacaccggctacccctccatctggccccggctgtctgccagactaaccctgggcacaggtgaaagtcaggctgggcatggtggctcacccctgtaatcccagcactttggcaggctgaggcagctggatcacctgacatcaggagttggagaccagcctggccaacatggcgcaaccccatctctactaaaaatacaaaacttagctgagtatggtggagcatgcctataagcccagctacctgggaagctgaggcaggagaatcgcttgaacctgggaggtggaggtttcagtgagtcaagatcgtgacactgcactccagcctgggtgacaagagtgagactctgtctcaaaaaaaaaaaaaagaaagtcagggccaccgggagagctcccaattccacacctcacccctactctgccagcagggcccagccacccccactttctaggtcaggatgatggggcacaggagggcaagcaggagccgcagtcctggcactgacttgaagcccctctgcgggccccactccagcagtgtccctgggcggccaaggccccttctgcccatttcatccgcctgaaaccctgaacgcagctgcacctcagttcccatgccagtttcaggaaaacagaggccactgggccaaagacgggcttcccagagccccactgggtcctgccggggtccagcccctgcctgtgtggccaggtgggtgccgctctttcatgcgtgcaatggacgacgcatggacagggcggcagcattcatctccaccaactgaactcaaaagcatgagtccttctttcctgctgagctgaccccacccaagcaacgttcttgaaggagagggtggccaggacattccctggtgggtgaggccagggcagcccttgggactggctgccactttgtagaaatacatccagagttgttctgaacccgggaaggccaaccagccccttggcagctgggagagacccagaaggaacagggatgcccccaccccacacactcccagagcagggactcaggtgtctcaggaatgttctcaggacagtggtccagcagtgccagtggacgccaccagagggcgcccccaggggcggagctggctgagcctcacacctgagggagcagaggtgtgcaggtgcactggctcctaccctcccggaccagcacctttaggaggatgggagaagaaacacacacacacacacacacacacacacacacacacacacacacacacacacacacacacacgaaaatgagaaggaggaggcacagggaggaaggaagaacacaggccaagggacaggtggacaggtaggcaggagagactgtgggggaggatgggggcagggacaagtgtggggcgtgttcctctctctgtctcagagggacagccctgccacaggctctggctcacctgggaggggcttgtgcagtgatgggcagcgagggaccctgtggtgtctccactaacagccctcacctcccagcggacactcaccatccacagatcggccccctcacaccccttgcagcccccttcctgttacaccatcactgcaacaccagctcccaggctgggcccggtgagctccttggggcgctcgccattgtgcaagctggctcagggcagcttcgaaccagggttggcacctccatgcaggaagcagaccctgcctacagctctgagcccaggccaggaggcactgggttgcttggtgccagcaggagtcccggtgggggccctggggaggctgggaggcctccctgaaccccatcaaggctgcacttgagggtgtgacctgaggctggttctgaccacactgccacgcccactgcagtcctggccaaggtttctggggctttgggtcagcgtttaggcaaataggtctggcccaagaggggtgctgagcatgtgcagagggacaggggacctggccagtcgcctccctgcccaggacagtcggcctcctcctacctggccatctctgcttcccctgcttcttagcccacacaggcctctgccaccgggacaataacacctgataccctgtgctccctgccccatggcagccagcggggtctttctacactgtccacaataaggatgaagatgaagacgaccctaagagtggccgacgtttctgcagaaccgaagactgtctatgagcagctgtggatgtcagtgcaggccaggtgctgaaagccacttaatccacccagcacactcgggagggggtgaaagtcatcagccccactttacacaggagaaaacagaggcacagaaccagcaagtgacttgcccaaggtcagctggcgggtgggtagagccaggtagccctggcggtcagcactgcttgggggatgttcagcaccggttgctcagcatgggctgatgggcagctgctccacccttcagacaggaggaagtggggagggctttcccctccacggcagggagagcacgctgtcacttatgcttctgatggtaaccagaaagagctctgggtcacccagggcccccagaggctgggagctagcagcctccctgaaagtggcccgttagtgccacatggccagggcccgttgccctaggaaagagctggtttttcaggaatagtaaggcaggcgcacaaggcatggggctgagctttgagcttcgaggatgaacaaggagcagaggggctcagccacctcctggagcctccaaaaggccctgggttgggttgcacagtcctgtgatccaccatccagcatcaccagggctggccgaatgagcgtttccctatctcaataaaggccacttccacaatggggcctcggtccacagccaggaagcagacagctctagccaggcccccctcccctggctgtaccttgtttgcaggacattcagaccaagtgtgctcagggcaccagcctttgcaccccggctatgtcacctgaatgtccctgcgcccagcatgggcctgggtaactgctccataagcaaacaatgtgcagtgaactggctcccttctgtgcctctcaccgtgcaaagacacttctgccccccgaatgcatatggccctatgcagggacagaacacaacagtggcacctgcatgccccaccctcatcccaggggacctcaaaaagatgcctggagaagcatgcctgcctccaactctccatcccacctggtcgcctcgaaggcaaatgctcaccactgctgtcccataggaggggacgtcagtgccactggcaggtcctagttaggacacgggtcttaagggaaggacctctcagctcatcagtgcccatccagagggttcctcctacagcacagctattgctaccattgaggatgctgaatcctggacagatggatatggacagggaggctgtgaaggggtggggaaagggaagatggaacaaggccaagaaagaagggactgacgggtcagggccaccaggtaagagcagtgcccctcgacttgggacaggcagtggcccacagttagggggactggctgtcctgattttagcactgaaagtcccacatcacaggcaaacctgaatggttggtcactctaccaacggttctaggtgacaaaggggacagtcttggccgagctctgggtcttgggttggacatggacctgggctctaagaaccaatgtggaatgcgcactggctggacaaggtgctgtgggaggcggccaccctgaacgccttcagctgatcttgagaaaaacctgaagttggtctttctgggacccttttttgagatggagtctcgctctgtcactcaggccggagtgcagtggtgccatctcagctcactgcaacctccgcctcccaggttagagcgattctcctgtctcagtctcctgagtagctgggattacaggcatgcgccaccacattcaactaatttttgtatttttagtagagatggggtttcaccatgttagccaggctggtctcaaactcctgacctcaagtgatctgcctgccttggtctcccaaagtgctaggattacaggtgtgagctaccgcacctggtcccttgttttataattgacaaagattaggcagattgggttttacctgcccaaggttatgcagctatacaatggtacagtacagaagcgtgtatgcaggaggccaggcaatgagcatttgaggcaggctggccaccatgatgaccacacacacacacatacacaatgattctctctctaacatgcacgcgcatgtctacacaccagcatgcacacaggcaaatgcacacagaccaaaaaaacacaaaaatgcatgcacatacatacacaggcatacacaaacacatacacacatgcacacacacatgtgcattctgtcccccgttcctcacacatgaacagggaaacagggatggtcagaccgcagctgcaatacacccggctgcttctctctttcccgagccacatctagcacatctagtctgcagccagctcaagtccctggccacgctgcctttgctgtcttattagattttgtactgggtgaaggggacacactctttttaaaactgtagtcagaagtcttgctaagtgtgtgaagtggaattggctgcctcgggggagccctttaatttagcttcccattgttctcagcacctgggactcctcccttggggtccttccaagcaggaatctagaccagaagcagctggacctccttgtttggctctggtgggaagcgtctgtgggctaaaggccaaagcgttgagaggacgtggggtctgccagctctaagaggatcaggcctcgaccctgtctaggggccgggagaagtgggctctcaccggcatgttctccccacaaactccttggctgtggccccaaagcctgggctgctggtcatagtcagggtgatcagcccctcctgggaccacgtgaggcactgaccctcctcaaactcacacggagcttgccaggtggagcccctgggggcaggggtggtggcggtcttcctccctgacatccctgaccttagctggcaacagagcatgacccaggcctgcaagactccccgcagccaggctctggaccccgagtggctttgaggccagggaggaaacaggaagcatgtaggatgggggcgagggtcaggggcctcagcactgaatgccgacatcaccaaaaacatggcaacggccggggaagcacgggtccaaggcccaaatctgagggagtgccaagtcaccagatgccagagccaggggcctgtgccgagtcctgcccttgctacgttctggctgtgtgacctcgggctcctcatagaggcgtctgcagcaaagaagccagcacagtgaactcctggagcagctgtacccatgagaatgtggaggcatcggtggcaacggccactgcccctgcaggtgcagctttcgtggctggaaccgacaccaaccctagcacctggggccccgacaatgagctgatccctgggaagtctcttcctcgactgaaaattctgggaggtggcgtgagaaaggcagagacctgcttgggagttggagctctgagtgcaaatccagctcccctggctgcttgggaggcaggagggtggggagagacccagacctggagttggacgccgaatggggtgctgggcaggagaccacaggcagttcccaaagtctgccctatgctgcccatgtccttgtctaggaaatggaacgaggcacaggctcctgtcacctggggctgcttcagagactgacagacatgccctctgtgctcctgccatgctggacccaggcctgcaagtgctcccctgagggttagcgctacctgagaccatccctgcagctgctgagacagccagacgccagagccctgagccggcctctccggcccccagcattctcctctgggctgggtttctccctgccacccacgtgtgcaccctcaatttggataaggtgtgtttgcaggcttgcaaacatggccctcgggagggcacacacccctgaccaggcttgcagccctgcctctctccctcttgacatttcacttaggaccaagaagtcagtacacaaggaaaggaaacaggacccgagaggccagcagtatccccagtccaccccaggatgctcagctcagcctgcacacctgccccgagctttcatcgtgtgcctccatgaggctcgggaaggtgaccccagccccccaaggggagaccgtgccagcagggacagtgagcaaaactcaggcatgaaagtttcctcaacatctgggttggaataaaatgggcttcctgctcaacttctgggccaccccaagttggaggagctgggacccccagcacgtggcggtcttccttcccttggcgtctgccactccttacccgacatgccagagaggctgcggcctcttgccgtcctcgcctgcgccgcccagcctgttgagcgatggggaccggctgcggggcccgggcacgtagctcccaatggtcttcgcggccccctcgggcttgctgggcatctgctgcagcagctggggtgacaggctgcggtgcgaggtggccgtggagcagacggcccagtcgggagcgctggcattgaggttgttgtcactgttggagcgcagcaggacccggggggcggccagcgtgttggggggccgccgccggcggttggagtacgccggggcctctcggaagggcactggggagaaggacatggagagaggccggtgagtgcatctgtgtcgtggtcagctgggtggggaccctagggaggtgcaggcctgcgtgcgtccaagcccccatgcgagcccagcagaggggagctgtgagttctgggccgagaccccagctggactccaccaggcccagaactcacccctgacatggaagcagagagacaggctggggacggagaacatctccacggcacggagctcaagccagtacttcgcatggaagggacgtggggtctgagcttccatctggcctgggagacgtccggctggcttgggcatgtgtaaggacgggccaccccatcacacaaagcagagagggcactgagctgcctgccgcaagatgcctcctccccacaacctaagttgagcctctggggtgggctgaactgtgtcccccaagttcgtgtgttgacgtcctaaaccccagttttcaaaatgtgccaatatttgcaggtaaggtctttacagagatcatctgggtggagggccattagtgggggccctgatcccataggattggggtccttataagaagaggcgatgaggacacagacacacacacagggatgaccccgtgaggacacagggagaaggtggcacctgcaagccatcaagagaggcctcaggaggaaccagccctgcgatgccctgatctcagacttgtagtccccaggactgggaggtgtaaatatctggttgttttgttgttgttgttgttgtttttgagacagggtttcgccctgtcacccaggctacagtgcagtggcacgacctcggctcactgcagcctccgcctcccaggctcaaacaattctcctgcctcaggctcccaagtagctgggattacaggtgcccgccaccacgcctgctaatttttgtatttttagtagagatgaggtttcaccatgttggccaggctggtctcgaactcccgatcttgtgatccgcctgcctcagccacccaaagtactgagattacaggcatgagccaccgtgcccggccaatatctggagtttaagccacctgtctgtggcgctctgccacgcctgagccaaccatacagtctccgagtccactggctggatgattcaatctcagtcctcactaagaaggtgccttcctccctcccatcaagtggggactgtgtgaggaagcaggggctgggcaccccttatctggcatcctacaaagctctagacagggccaggccctcactctcctcactcaatgagaccaggggctcagaatgacagcaacagcccctgggagctttgaggggtggcagccacgccgcagctgccttggtttacccagagctccagagcctaagacagcgagtgccctttccaagaaagaagacctcctgaaaggcagccctccaagctccgcaggaaacagcagaaaccaccatcactggggggccaaaggcacgggcttctccccggcccgtgataatcgtgcctgcagcagcttttcactggctacaggattcagcccttaggctgaagccacgcttggctccgaagtttccactgcacaggaccagggctaccatctgacaaactgcaaggcaagagaaaacacgtgtcctccctgggattgggtctgggggaaccttcatgcctcagaggagaagaacgtcacaagtagtttaggacacaggtggcagtgacgaagctcttggggacatggatggtgctggcagaactcaagggggatagaggtggtgctggcagaggtcacagggacaaagatggcactggcagagttcataggggacagaggtggagttggcagagttcatgagggacagaggtggcgctggaagagttcacgggggacagaggtggcgctggcagagttcacgggggacagaggtggcactggcagagttcacgggggacagaggtggcactggcagagctcatgggggacagaggtggcgttggcagagcccatgggggacagaggtggcgctggcagaggtcatgggggacagaggtggcgctggcagaggtcatgggggacagaggtggcgctggcagaggtcatgggggacagaggtggcgctggcagagctcataggggacagaggtggcgctggcagagctcatgggggtcagaggtggcgttggcagaggtcacggggggcagaggtggcactggcagaggtcacgggggacagaggtggcactggcagaggtcacgggggacagaggtggcactggcagaggtcacgggggacagaggtggcgctggcagagcccatgggggacagaggtgatgttggcagagttcatgggggacaggtggcgttggcagagcccacgggggacagaggtggcgctggcagagctcacgggggacagaggtggcgctggcagagctcacgggggacagaggtggcgctggcagagctcacgggggacagaggtggcgctggcagagctcacgggggacagaggtggcgctggcagagctcacgggggacagaggtggcgctggcagagttcacgggggacagaggtggcgctggcagagttcacgggggacagaggtggcgctggcagagttcatgggggacagaggtggcggtggcagagttaatgggggacagaggtggtgttggcagaactcatgggggacagaggtggcactggcagagttcataggggacagaggtggcgttggcagaactcgggggacagaggtgtcattggcagaggtcataggggacagaggtggcgttggcagagttcacgggggacagaggtggcattggcagaactcatgagggacagaggtggcgctggcagagttcatgagggacagaggtggcgctggcagcgttcacgggggacagaggtggcgttggcagcgttcacgggggacagaggtggcgttggcagcattcacgggggacagaggtggcattggcagaactcatgagggacagaggtggcgctggcagaactcatgagggacagaggtggtgttagtagagctcatgagggacagaggtggcgttggcagcgttcatgggggacagaggtggcgttggcagcattcatggggggcagaggtggcggtggccgagttcatgagggacagaggtggcgttgacagagctcctgggggacagaggtggcactggcaaagcacatgaggacaaaggtggtgctggtagatttcactgaggacaaaggtggcactagcagagctcacaggtacagaggtggtattgacagctcccaaggacagaggtggtgctggcagcgctcacaagggacacatgtggtgctggcaggtttcattgaagacaaagatggcattggcagggctcacaggacagaggtggcgttgatggagctcctgagggcagaggaggtgctggcagagctcatgggggatggagggtgctggcagagctcacgggagacagttgtgacccggcgcaccttccccacctccccaggacacagggcagccctggagacagagctagagccaagcctggggagccgcacagagctgcgcaaagcgtcctgaggttggatacttggacttgacacacttggacgtcagtgcctgctgtcggtaagaacctggaggtggtacattggggaggtcgcggtgtcacacctgctctgatctggttcctctgtgaagcctttctgtcattgaagatgccctgctaagcagccggggctcctcagccagcactttcatcccactcctaatttctcaaagcacacggatccatgaacgccacccaggctggccggggagagacaaggaacggaaaaagctgacggcactctccgtggacatctctccttccagagcccctcgaggggcttggcctgggatccacagccaccacccacgagaaaaacctcatccctgggacaggtcaccgagtctgttttgttggtcttgagggaaaaccatgttggtgccctccctctggaccggcagagactaaaaaaaaccttgtagatcactgagtgtttgcatggaggcttacaaagatacgactggcccagagggcttccgggtgatccgggaactgcctgtcattggagggggctgggcgggtggattaaaagaccttgcaaagggctgatgagcccacagtctcagagagcgattatctttcatttacagagattacgtgttggaagactgtattggtgtgagagccaaaatctcaaacagacacagccagcagaaagcagccgcagagcccccagcttcctggggcaccccaggagaggccacggctctccctacccatgtggaggagacatcacagggcccccagtcacggaaacgctgcctcccacagccgactgcctcacgcccagcttccccgccccgacaatgcagccaattctctttttctgacccttgtaactgggggaggtatgcatactcttcatagcaagtgatggcatttgggggagtcctggcagttgctaagataaactcattaggaaaaaaaaagtctataaaagaacagaacagatacagaattaacctaacaccaaaacccccaactgaaattttcatgctgttcatggattataaaaattgaaaccccagaaggtgaattttggtgaataatgtcagaaaatgggcacagacaaaggttgttatttatatacattcctaagactctgtcagaagagtatggacttagaggggggaagaattcacatggggaggccacccttggaggattaaggaataaaagagctgggacattttcaaatacatttttactctgtagaccacgcaagttactcaaatgaaatctcaccggtgacatcagtgtgaacattttaatgaaaattacctcgcgtaattaccaagattcatattaaattagtttcctgagtactgaaatttctttggtgtttattttgcaacgagctggggctgggaagtaccttcctcatttctctaaagtcatacctttttatgatatctgatttcctaaaatgagagctctctgacaaaactctctaactggaaccatccatggaaatgatgatttttttttgtgaaaagggttaaaaataactgttttctgtctgaaaatgattaatattccacccaactgtttccttcttttaggcaatctgcactctaaataggtggatattttcttagctggcttacatgcatttatttatacatttttttccccacaataaaaattacacaaggtatgacaaacagagtgtgcacttttaaagttggccacgctcccttcccatccattccatgtaactgcaaccccgggatgggagagccgggagcagctcggaaggtagccacccatttggtgcagccagccatgtgccccgacctgcctcggccagtgcctagcagccctctggtcactgaggactatagtcaaaacttcctttattttccctaggacttagttcctaacacactccgtggcacggtccccacggatggccattccggaatggagttccacaagggctgaaggtttgaaagcagcacacgataaggcgagaccttccaccgcgttatattccggaccaactcaaaccaaaccgtatcccaaaccaaagtcattatcccctgacatgctagggattaacaactggcaattttaggaggaactggagtcctccctctcccccaccccgagaatcagcaagcagctgctaattcccatgcacccggctcccgacagctttttccttaccttccttcttggtgaaggcatttaacaaagacttcattttccctctgactttggcagcggtccgctcattatataaccttcctggatgggaggaaggacaggcgtgcagcccggcccctcggtgctagagcagctgggacccggggagaggtggcgggtgtctgggcacggtgcacttccgagcatagctgggcatgccagacccagcgtgctggtgacaaagcccaccccatattctgtctgtcagctgggaaccaactgcacgtagacgggctgctctcaaacccggctacctctcgcggcgcgcgtcatgtgagccgggctactctgcttttgtgctcagggcattgaggaagaggcaccgcggagggttaacgcggatcaggcgtcctcgagctggcagctgggagacgccgggaggcatgagtgagctcgagccccagttatccaaggaaactcgggctggtgctgggcgctccatgcgcctgtgcctaaatatactgcactgtgcttttctatttttttaaaaaaaaatttttttaaagaaaaagccaagtttgtttgtcagctagcagatgtggtaagacagacaagggggagggaagcgtacaagtaccagataagcttcacaccagacccacgttccccgggcagacatggccagcattctggaatttctgaacacgacctatatttctgttcaaaagaatcagacacaagtgcccatgacttctctggctccccacccatcgaggtaattaccctggaaaaaacaggactccaccccctcctacttttttttttttttttttaaagagagagataaaaagacaattaaactgagaccctgccaaggatggccccgattccaggcagctgataaaagcgagctcttcagggtcactttaggcatttcctcagcatttccaacccaacagaagaagagaaaagaggaaagctgccccttggaagccctacatggagaaagtcagatttataaagcaaacacagagaagtggatgcaggctggtgccctgtggcaggtggacagtgagttatttctacaccaggagaaggagcttcctgaagctacgtggagcatccaggggcaaggttctgttgccggatgcctctgctgggctgtaatttagtgtgctgtgtgtgtgtgtgtgttttttttttttttttttctggttgctaagagaactgcttcagaaatttaaaacacacacacacacacacacacacacacacacacacacaaccagagaaagacgagacaagacgaggaaaaagcaaccagagcactaaagtttaattccatatggttgacacactttgtgtcaataaaaatggcggtgtgagaacaagaaggctgggggccccccaggagcctttccctgaaggcgtaccagggacgggactgcggcatgcctcggtgagggcctctggctttagggagagcagagactgccacagaatcactgagtgtacgccctatatcagctgagcacccgaacagcatctcttggccgggtgcggtggctcacgcctgtaatcccagtgcttcggaaggtggaggcggttgaattgcttgagcccaggaatttgagaccagcctgggcaacacagtgagaccccgtttccatgaaaaataatttaaaaacattagccgggtgtggtcgtgcgcctgtggtcccagctactcaggaggctgaggcaggaggattgcttgagcctagaagttcaatgctccaatgagctatgattgcaccactgcacatcagcctggggatagagcaagactgtctccaaaaacaaacaaaaaaccccacaaaaacccagaaataacgataaacttcatctcttatttaactcacacaactcatgagccatgtcaaaactctgccggggtgacattctcaccctaccatgcatcaccgactcataaaactgagtcaaagccatttctaagacttgcattaagaaacggttctgaggtcagagccaccagtgtgtcccacagagttcatgcacctcctcggacactctgagcaaggctgaacagcttccagaagaaccctcctcggatgcacaaagctttcccccacttcgggaggcctgacgatgtgtcctccgggtggaccagccaggggggccagaagctttccagatggtgagtgtctagttcattgccatgtgctggcctggctgcctgccctggctggcgagcgctgggaggctgagacggggatgccaccgtgtccgtattggtgtgtacagggagctcctccaaggctgggggacccggctggtcgtgtgctcagccacgtgagcccagaggactcatcaaagcgcagggaactctcggggagactcagtgacgctcaacaccccctccatctgtcactgatcgattccctcccaaaagcacagagcctcatcccaagccaagtttctgagccaatcactgctccggcgctgctgcctctgcggcctgccatggtgtggggagagcctgcacgtttctgggctggtgaggccaggatggcccttggcctgaggccagcggtgtcctgtcatctttggctgccttgccggccacggaagaccttgggtggagggtgtaaggaagaagccacctccctgggaccatgtgacaatcctgcatctgttctgactggtggaccaggcaggggacaaaatggagcctttttcccctcacgggggcctccaatgtcaaatatgtcaaaggaccaagaagaggccctgccccatctaaaccagagaaaaacccagaacctctggacgggagccacgcagcagcactcacagctggcccagaaaggaccctcagcggccaccgtccggtgcgtgtgcagcagctgctcctggaggtgcatttgcccacaagcaggagcccaggcaggggttccatgaaccctgggctgcccagggagaagggaaggagccttcccaagacaaggccccgtcaccaggaatacggctggcttccacccctggggtccctctgccccgcccacccccacccctgcaccccatgtcccatctggtttgggggcatgcgcagaagacagccagccagatctgaagacccaggcctgcttctcagcctgtgcaggggtgaggggcggggcaggatgaggctttggacacaagacgatttgaggaatccagggaacacccccaggctaaaggatcccttttccagacaccttcaattctttcaataagcagacaacttttcccgcccacactcggaggaggctgagtaaaccattcacaaagatcaggagcggtggtggctccatcagtctcatgcacacacctactgagtgcccggtcctgggccaggctctgccacacggggtcttctggtcaaccccacagaaatcctgccaagggagttgggccattcttgacaccactgtcctggccatgtggtaggctctccgtggataattccagcgacgggggactcactacctttgcacaggggttctcactgtcagacgcgggcagcagcctgtaagagcctccttcccccacacccaccacttgcccccttccctggtgggtgcagaccacttcctcatttgccaagaagtctggcgctgaaggcacagactctgccccgacaaacgcaaacctttgtgcagcctccagggcagttttcatctggtgtccccatccctgcctttctgggggaatatttatcttccagccctgggatgtggccatgggaacatcagcattcctcctgcccctcgttttatgagcatgtccgtggcctgaagcctgccctgcctgcctggctgggagggaagttctgtgtggacaaatgttccgtgtgagtgtttggggtccgggccctcccagaaatccacacttggggttattgcaggagacgagctcacccctgagccccaggtagatggttcgcattctcctgccatctgcacacaggcccggcccttcaccctccaagccacggagacccagaaacctgccaccgaccaggtgaccttggagagctggggaagcagaggcgggtgcacagcctcccgcagaactccgggaattcgctagcgcccttcccatctctaaaacaagtattccgaggatgaccgagcgctagtggttgagatgaaaattaagacaaagataaaagatgaaacttaaaaacccattttccctggaggcttccagagatcttcttctctgagaaaagcctcaggctttgggaatgtccccgtggagctgccatcctgggtccctgagaccagcagcaaggctgtcagatgagacagacgaggttcagagaggctgagcgctaagctgcccagggcctgggaagggtcagacatccctgctgcacccacataggtttccacgcattggagcccaaatgcccacagcatggctgagcactcccttccttctgcctttagacccactgttcctataggggtcctgcgtggagggcctacaacgaccctggaggcttgtgccggccacattcctactgaatgcagatgaggttttatttcaaatggatttcattctggaagagggagagattggaggggaagaacttccaggtgtgagttgggctgggggcaggcgggtagcagagagggtggcaatgtgagtggttggtgatgaagctatccacctgcctgcctgcccgcacacccacccgtcccaaaactcaggcaagcaccttttgagtctgtttgttgcctgcccgcacgcccacccatctcaaaacgcaggcgagcaccttttgagtctgtttgttgtccatggacagatgaaaaaccaggaggaaagaggagagggaggctctgaagtcagagtttccagaaaggaaaagggtcacccccaaatgaaccccaaactctcagccacccaacctggctcttcagacaccaactcagctccactcagcccagttccagtgcctggcccttggtgcttcgtgagccagtgacatccaaagccccgtgcccccttgcctccctccctgcagcccctgcccacaggcatcccacagactcaccccatacactgcaccaccccctcaaaccctgagactcactaagccctttatttgccatgtcttttgacaactgcctgacaacggactgaaaataatttcacttcttgcataaaaaaaaagctcttcacacatcagaacatttcaaggtgctctgaagtcctggcggggacgccgtaccaggtgttataaacatgccagcaagactcagaggtgctcacgggtctcagaaacatcctcgttcagtggcgatcagacgcccgcctccacttgctgtggcttcagtgcccatgtggtttggaaagagccggacgtgggagtcaagacgcaggtttgggtgctgactctgtatcatgccccctgcagccatgggccggttggacaccccctgaccctcagtttccccatctgtaaagtaggaatagcacaacttaccccacagggtggagccacccgagctcgtgtttgaagcacaaaggagaggggcttggtgcacgcaacaccgtggggacacctttggggacaagtctcagctctgtgagcccagagaagtcccatgagctctctgtgcctctgtttcctagtctgtttaatggggatattaatggtgccacttcacaggagagtcataaggataaagtaagttaatatttgtaacagtagtacctggaggcagtgtcggtgatccctgaatgaatacatttaagttttaaaaaatctgtaagtggatagcaaggcaatcctcctgctttgccctatctctataataaacaagtcctggtctattgctcacgatgcattcacattatccttctgggtgctgcctcctccaggaagtctccctgactgatccaggcagcagacagaccactcctaagggctcccgtggcagcagtcagcccttggggcatgttgtggagccaggagcctcccagcttctcaaaggcaggttccgtgtccagccctcctccctgccctgcacactggcagtgatccctagtgctctggagatgaatgaatgaatgaatggagtgaattaacagagggggtgagtcctagctttttttctgagtgttccagagcactttactaggttcaccaggctgctctctagttgtgctgctctcctgaggccagaagccaccttccttgtccaactcccaccctacccccaccccctcttctgcccagggccttgcatgtacccagtggaggcccagggaggcttgggctaagccacagccacgctaccagctgccccagaccctgagaaggcctgtactgccccgccttgccccacgagcaggtgcagccaggacagcatccttagcgtcctcactgcatctgcagagcagctaggctgttgtcctcagcatcctcactgcatctgcagagtggctgagccagtgtcctcagcatcctcactgcatctgcagagcagcctggccagcgtcctcagcgtcctcactgcatttggagttccctgcaccccatgtcctgcctggaaacagtgagggctcatccctcagcttccccagctgctgtggtttcgagttcgagcccatcagacacatgggccaggaaggcactgatgcagaaggagcaactcacagaagccggcgagtgtggcacggggctccagcacaatgtcaagctcctgccagcgcctctgactgtgcacagcaccaggtattccatgcagcccacctgtggctagacgccccgactggccaccccggctggccgcagttcccaggcctggctctccagccctcttggagcacagtgaccgcctgacatctgtcagagtcttctgcctcctgcatcaacaagccagggtggactctactgctggtgacccagaccctgaccggtagagcccgtgaggctgggtctcgggcaagagagctgggcatgcgacatctctcagggaggcctctggtccagggaccctgacagcatctctgcaacatctgcagctggactttctgggttcaaatcccacaaggtaactgtccatgagtcacaaaatgtccctggactctggatccccaaaaacaaagcaagcacagtgatgatggtcacttcaaggagctgctcagggggttaagtgcatactgggtgcagtacttacgcacagtgggtgctcaacagaggttagctgttgccatcacgaccacgactgaagtttgtttattattgctgactgttcattattgtgattattacaacagcttgttgacgagggaggtcctgacaggcattctcagtctctctgggcagctcaggtggctgcaggcagtggaaggccatcaggccgctagagacagggtcctgacccaggccaggacagtgttgtctccccaggacactgcttctgtgtaactcagacccaggcccttctgccaggaaggagctccaagttgatgaaggcacaagggccagctttgagcgtcaccttcaacttaaaccctgggcaaaaccctgagtgtgatcacaaccaaaccagaagggaagaaaataaaatgttgggatgtaggaagcaatgccaagaaaattcccagggttctggggcaggggatgccctgatatcccggagatttattaaggctccaccccatatttcagggggagacgcaggggagcacctgagcctatttccaccttaacacaaaatacacaggaggtggctctaactctggtcccaccccatatttcaggggaagacacaggggagcacctgagcctatttccaccttaacacaaaatacacaggaggtggctctaactctggtcagactgaaggcccatggggagccgaaaaaagaaaacaaactctagacggtctcagtggcccaccagcccaagctccactttatcttgcagaaacaaagactgaatgctgagaaagtatgtatgcaagagcctcagccagcgggggccaagccaggagcaggggtggcaggtgcagggcaggtacaagctagagcgggattcttcctgcccatcccccaccagatccaaaatagcatctcttgtttctttccctcgtagctttagataactgcaatttaaatattagtaggcaacatttctccatctcacaataattgttaaatgaatcatgcttttataaataacacaagatataaaaaggcatctcagcaataatgcggggttatctttgcacaaagaggtaggagtctgtggtgtttgtaacgttcccgtcactggagtcattgagggaagctttgctcctgcaggatcgagggaggcccgtggaaaatcggggtgagggcactgaggagcgggcgtcggaacctcccacagggtctctctccctggttggagagctgaaaggggctgggggtgtaactccaagagatactactcaccggttttctgaccctgaattgagctttagggccaagaacatggctattttggggggcagcggggaggagctctggagggtgaaggtgggtctgaccacaaagagaggtgaggggttcccaaggtatattctagaagaatcacagcctccagacattgcctcctctgccctccctccacgcagctccagccttggccacaggctccctgcagagccacagccccagtgcacaggacactactgtgtgcgggacacacctgaaggaggaggggtggagccaaggggcgtgcaatggcttacgggcagcatgaaccatccctgtggtggcccttctgagagctgagtgactgtggatacctgggcctcccacaggggaaaatgaggcttatgtgctgagacgtgctccgccagttctcgaggacacaggacgctcagtcaagaggctcatgtgctgagacatgctccgccagttctcgaggacacaggacgctcagtcaagaggctcatgtgctgagatgtgctccaccagttcttggggacatggtccgctcagtcaggaatcacaaccaggggccgaggtgcaggccaagtgggctgggggcttatggaggaccctggggccagggtgatcttgcaccatgagaagagatgtccagtccctgggaggaactagagctgagctggaggacccctcttggagtgagccattctctttccacaggacctgatggggtcctttgttccagcttcttataaaaagaatgaaatctgagcttggtggtggaagatgtgagtcctgggtcagtctctgactcaaggcagggttctgggactcagttttctcatctgtagaatagggtgaccagcctcattctgctgaggtctcatgaggtctctgagaatcctacaggctagacaaacccaggcaggagaagcctggagatctaggggcagagtgggctccctctcggacctcagtggaggctgggggagtgggcaccccgagcccactgcaccccgagcagggcagcagctctccctgtctcaagccacactggggtgggctgcccaccacctcctctcccatacaagagagcccaccaaggtgcaggagggactcctgaaatgtgggtaggagtgtcgctccgtttccagccacagacaccctttcacaacatggcctgcttgcccatggggggccaggggaaggcccagctctcagtccttaagggagcgtgcctgctgcctcctctttctgagcggctgcacactcagaagcagcatggccccttagccctgattctcaggccggctccacacagctgccactgggcacagagggaaagcttgggcgagactgggggtgaggacagtgcccgcttccacccttgctgcttgagacctcaggcacgtggctgtgcctgtccgagcctgagcctgcaagttggagaaaggataataacagcagctgtcttgaaggccagcagttgtgcaagtcaacgtttacaaagtgccaggtatggagggaaaggacttcctgtgggtggccccgggtgccacccaaggcctggacctctacatcgttcctgttgctcccccatgggtagacgctgtctggagggccctgcctgcctccatcacagcctctgctcactgttcataggctcctcaccgcctgggcatttggtgccagactgcagatgccaggaccacacagaaagaaccactgcagctgcccaacgcctgggtgtctcaggacacattcaagcactaggcccacccagcagctcccctcacagactgactttcgtaaagcagcacctgagaccatctgaggctgactacagtcaccaagtcctgtggcctgaaggtttacatcccctccaaattcatgtgttgaaaccctaacctcccatgtcatggtatttggagatggggacattgggaagtaattagggttggatgaggtcaaggaggtgggaccccatgatgggactggtgtccttgtaagaagagacttgagagttggtcgctgtctgtctctctgtctctccaccatgggagggctcaaccagaaggctgccgtctgcaagccaggaagggagccctcatcagacacccaattaagatccaatcaaggctggcaccttgatcttggacttccctcagaacttcgagaaaaatgtttctgtcgcttaagccaccagtctatggtattttttgttaaagtggctgcagctaatgaagacaccaggcagactgagcatgccactgcccccttacaggccactgccccttacaggcttccaggggacttacgccattgtctctgctgctcctgctcctccagatgctccctcacccacacgggccctgtcagctccctcccactggcctggacacacctctgcccctgctgtgcctaccctccatctggcattcctctgcctgctctccccatgtctggctgcttccaactccaggccttgtgcattcacgctcatggtcaacgcatgaggaggctttccttcaccatcctgtccaagagggttactctcttaatctctatgctagccccttgtgactttttccttcattgtatttattgaacattgaagttatgttagttttaagtttgcttatatggtctttctcccccaagtaaactgtaaactgctgacaagtgcagtctgtcttaatcaccactgcatcaccagcacagagcccagcccctctcaaagatgtgcgttgaggccaggcacggtggctcatgcctgtaatccctacactttgggaggctgaggcaggcagatcacttgaggtcaagagttcgagaccagcctggccaacatagcgaaaccctgtttctactaaaaacacaaaaaatgagccaggcatggtggtgtgcctgtcatcccagctactcaggaggctgagacaggagaatcgcttgaacccaggaggcggaagttccagtgagccaagatggtgccattgcactccagcctgggcaacagagcaaaacattctgtctcaaaaaaaaaaaaaaaaaaaaaaaaaagaaaaaaaaaagatgcatgctgagtaacttcatccaataaatgaataaataaaaggaaggcacgttcctacctcccaccctggacttgtatggtgtttgcctcaccgtgtgaaatgtcttcccaccatgaacactgcctccctacaactggggccttctggaagacctggggcaggggaggggccttcacacagttttctatgctcaggacacaacagaagaccccgcacaaagtgggagcttatcaatacatgttctggttatcttaggtccttgtgtgcctgcttcaacacttgggttgtttgatgctgcttctaacaattgtggcttcctttggttgcacattgcattttccttctcttcctagctagtaatttctgattctatgctggtcattgtgtttgttatgtcggagagactctaggttctgttatcttcctctgaggtgtgtttagtttttcaagtaggtagtaaaactatcagtgcaatgccttgccccgtggaggtgcaatctgaggctttgttgggggagtctctgttgatttggtcctgggatggagtcctgactcctagggcccctctgtggctccagctctggatgtttatcaagctcctctaacatgctgggactcaattctatactctatctctcctgtggaagaaattactgaagtctccccaaggcacttgggcttttagctactgttttccactgagtccctggactctcactctgcacaggccgattcaacaatccaaaaggaatttatgtgtagacttcagggccctccactttccaggatttctattgacttccagtctctcaggcaactctgaccccaacctccaacccctgaatccacaacacagtaagactccagtttatgtcaggggaaatctaattaatgtgggccttacaagggtggggggcccctcttctgtcaagggtcccagcatctctagttctgtctgcttttggccacttgcccaggcctacaagcagctggtgttggtgtttatatagaatttgtcccgcgtttgccactgtaattaacaggagggttagtctgacatgagctgctccatcactatgggaaagcagaagtcatgggctcatcaatacatttataattatatttaatacaacacacttgcggatattcagtaaagtgggggagaagtcatccaataggctccttcaaattactttttcattctaaataaaactaaggacaatggtaaaacatgtgggctccagaactcagaccatgtgcttggaggtgtcttggttgctttatttggtaactcagcctagaaagccctcagggaaagggcgggtctgggccagtggccctccccaccccactccacagcccgtggtatccggcagccagcgcagtctccccaggtctggaggcaacacacacccccctggtagagagggcgggtacgtcaaaggagagaggggaacaggatgtgctgggaccactgactacgtaagccaaaaagtcctgagcagacaggaggtgcagccttcctgtgccactgggctcctggacctggacttccttataccccatcaggaaaggaccacagccttggagggggtttatttcaatacaagaatccaacttttgtaaggtttgagtacctccaggaggctggaagtgaaggtgggttgaaggggaggtccctttttagatcgaggtgtccccggtaaagctgccaggccgccctggaaaaggaagcactcaccaggcggctgagtgaggctggttctccacctcagttcttcacctagttagcgaatccaaatgcacatttatattttgggaactaattaaggctcagtgactgatttaaccttcaaataaattcctcccagggccgagctggcagcatagtgaatatcaggcaccacatctgcatcaagaaaacctcaaagtctaggaagaaccaaaacccaaagggaagggacatggagaggagggaatgtcaagcgtgaggtgggctcggccggccagcagctatgcagccctggggctgaaggcagagggcgtggggcccaccagctgactccccacatggtgacggcgtacagtctgggaagaacagtgtgaggggctttgaggactcaggcattgtcacggtcacagcttcccaggcagtgaaagcctcactgtgatcgccacctcaatgtcaaagccaaccagaggtgtcccgactcctggacagggaggtagttgggtgggtgcctcggagggcaggtgagagctcacctggcacactacagagcatgaggcagagatgcccaagggcaggtccgcagacccacctgcgtgttctgggtgctacctctgcctggctgggagtcccagctccctggagcctcagtttccccatatatcaaaaggaggctagaatgcaccccaaaagtccttcaggctgcaagatcccccctctcagctctgaggagcatccttgtctgggaggagccctcagaggagcagagtgtccatgggcctgactcctgggattctaggggcattaactgacacaaaaggtggagacctgggaggggagccctctccctctgaactgtccacaaataaaagggcacacagcggcagccacatactgtagctcagtggccaaggagagttcttgggacctcagctatcagggcagggctcttccaggaagtgggagcctggggagggctggggggccatatcgggaggctggagcctgcagactcaggatctccctcctgggtgccgaggacagggacaaggaactgcagtgggggttctcatgctgcagccatcccagcaccgggcacttctaagagatgctgatgaggccacccccagccatcaagacttgactgtgtttcactggagcttgataagacttcacctgagaaacactctggctggctctgatctcttccagaggtgtataaaacatataggaataggccaggcgtggtggctcatgtctgtaatcccagcattttgggaggttgaggcaggtggattgcttgaggtccagagttcaagaccagcctggccaacatggtgaaaccctgtctctaccaaaaatacaaaaaaaacaaaattagccaggcatggtagcgggcacctataatcccagctgttcaggaggctagggcaggagaatcgcttgaacctgggaggcagaggttacagtgagctgagatggcaccactgcactccagcctgggtggcggagcgagactccgtcttaaaaaaaatagcaattatcaccgcagtgaaaggtgggcagtggcagcaggtgatgcctgtgacacgccaggcatggagggcaacagctcacggcttccatctctccttcctccaccgccacccagggcacagccattttccccattacacagcagaggagtccaaggttcagagcaggtcagcaactggatggaggtcacacagccaggccaagatgtgcttgggcttagcctgtggagtctgcctttggccccatcgctgacccagctgctgagagtgaaactcaagccctgtggtgccacattccaggagggtctccaccttggttcttcaggaattctggcttgacctgggtgcctgcgatcactgttggaaggtccggggcccctttccgtctgcttctcccttaggcactagagccagctactgcagaatcggggtgagtctccagcccgcaaagccaggatgacgtgactgctcctcctgcctggcttcttgcttctcttcaggacccaagcatgcagtgccacttctgatctacagaccttctcaggcctcaaccccaaccctgactgtgcgtgtctgctcgtcagctcccaaatcttctccaagtcttggctactgtcaccgacctgggcagacaaccccagagcccacagcctcccaaaccatcctttacacacggtccttgtgctgtcactgcccttattcctgggacctaactgcccttctcccttaaccctgggctcctccaggacaagagaccttgtctctctctactccacacgccctgaagcctggatgggtgtcacagctatttggcccatgcttgttcaaatcacgaacagaacaaatgcaatattggcgatatctgaaaactcaccaagcatttacttccaagtatatgaaatctcattatgttattaaaatatttaaacattttactaatttctttttagtaaaatttgacgatggttttgccttcccttgacttggggccaaaacccatgctggaaagagacagacactccagggaataaagcatattccctgccgggtggctccagacctttctgcagcaccatggtgaccccgaggtggtcaagctatgagtcatggaggcccatggcccactctgcttcaatcagcactggggtttcgctgtgccaccttggccaggctgcataacctgtctgagccactgtctctccatgtgcaaatggtgttctagggccctctctgcacttgtccctttcaggagctcctttagcttcaaaagcagaagagaactgggcacagggaggggtcagcagccctgcaccgtgagctcctgccctggagcgagcatgagcctcagcctaggtccctcggccaggagtgggtcctgctccctgctgtgccacctgggattctcgtgcagcttaaatggaactcggcaaggaagctgagccctgtcctgaagctaaaggagacactgctggaggctcccaggggggtgggaggcagcacgcagggtctccccacccagaggcccaagagacggccgaggtgaagctccctccacacggtttcctctcagcatctgagcttgcacggggatctgtgagaataacacggacggtggaaccttccactccacaggctcagggggccgggctgggcggccattccctcgtgtcatctgactaccctgacgcagtgtcatacccctaacacaggtgtggctcgcatctgcacagagctgcccacaccacaccctgggcctcagactcccagagcgggctgggcagaccctggactctcacagcatgtggaaggctggggtgtgagcccagagctgaggctggaaggtacaggtttcaggtcatggggtcagggagcagaggctgcagtggagatgctcaggtggtgactgtgactgggaggttgcaaagacagctattagggtgggctgggctgctatggggtgggctgggctcctatggggtgggctgggctgctatggggtgggctgggctgctaaagggtgggctgggctgctatggggtgggctgggctcctatggggtgggcttggtgggccccaggaggaggaagggaagcaagtcttggtggcttttgggaagagtttatggatggctggcgctgtagacagagctgaaattcgtattgtgaggtcctgactcctagtgggactgcatgtgaagcagagtccttcacagtggttaagttaaagggaggccactagggtgggcccaaatccattctcattgatgtccttgaagaagaggagatgaggacaaagacgcacagagagacgaccctgtgaggtcacaaggagaaggcggcacctacaagccgcagagacaggctgcaggaggccccagccctgcgacaccttgatctcgagctccagcctccaggactgtgagaacatagaggcctgctgttgaatgccccccagcccacctgcagggctctctgcacacgggagactgatacagggctcaaccgattcttagaggacacacgagtcaacttccctaaaacagaactgctccagccctcccaatttggtgctcagggaccaggagttcacaaatatctcctggtgcttccgtcggaaggcctgtgaatgccatctccttgggtgggtggccataccatcttcatcttcctcctcagtttggggacacggccttcgtggacgattctccagtgagccctcagttttcctagggtaggaccacactgtgctgcgtgcaccatcccctgtcccatctgagtccccaaggtggtgggagctccctgggggatgagtgggcgcctccatccatccacacacacccagccctcgcctggcttccccacatctctggacaggaggactcttctggcagtgtgttctccctgccacaggcacccctacaacattagttcaactcattaatactctgcttaaaaagaaaaatctaatgaatgccccattttcctaattgggtcagcagagcatgccttgaatagcattcaagctgttcagtttctacctgaaattgccatgcgtttttccatttgggttggggggccgggggcggggcatgaaaatctctccccctaaatccttactccagccttcacagccagcattctcgacaaggggatcatctaaaacgctgggcacgtttctcgacatagcacaaactcactggaaccatggggtttggggccgcagtggaggagttggaaacacaggctccacgccgggcactgcccttcactccccacactgagcacctggccctcctgctgcagccctttgagtaatctcgtgggatgttacgtaatattcctggaggatacatgctgttcttttacatgacaaattcctcagacagggattatctcagtccagctgagatgcttttcgactttccccatgatcaataacacggcggagaacattttcacgcaggtggcacctttcttcatttgaatattttacattcccaggagcggaaatgccaggtcaaaaggtctgagcgcccccatggccctgggcacgtgtctggccaattgctttcaccagagttatgccaatttatatgaccaaatcactgggacccaatttcttcttatgaaaataaaatagggctgggtgcagtggctcacacctgtaatcccagcactttgggaggctgagatgggtggatcacgaggttaggaattcaagaccagcctggccaagatgctgaaaccccgtctctactaaaaatacaaaaattagccaggtgtggtggcacacacctgtaatcccagctactcaggaagctgaggcaggagaatcgcttgaacccgggtggcagaggttgcagtgagccatgatcgtgccactgcactccagcctgggtgacagagcaagactctgtctcaaaaaaaaaaaaaaaaaaaaagaaaaagaaagaaagaaaagaaaagaaaatctttttctaaaatgaggtatagagaaaatgggtttcaaccagaggacaataaacttcaaagatgagaggactttccactggagtggattaggggagacataatttcacgctgaaggactcatcagaacagaatagtttctccttctcacagagaaatggactctgataacatcaggcctattccaaatctccaagtccatggcatttttcctactcggcttcgtgaacttccaatggaatgtgcttattggccccggggccagcacggggccatcttaggtgccgaggatagagaggcggtgttggaagaaatgggtggggatgcctccaaaccacccacaaagaccgttcccagagaccagaggcaggaatggcagacaacctggtgacactgagatgccaataaaacccaggattgattgatggaaagacgagccaagccagggaaaatcagaatgaaacagacggccccgggtgaatgaatgcacatttcccataattacatagagatggaaataagcagcacagaacaaagcgagaaggagagcccacttccaagttgtttgcagcagaggctgaaaatagacaccggagaggtggtgctggatagaaaccgccagtgtttgtctccgagcttcctgcaatgaaacaacaagcaacgcactgggggcaggaaacggagccgtcagaggaaagcaccccagagacgctgttccccgtctcccgacactggagaaacaggtggccaagggcagccgccaaggtttccagaggctggtgccgagcccagagagacctgaactgggtccctgggaaagcggaagggcagaaaagcgaactggagagtctagagtgcgcttccagtgggacagcacccccaggcaaagtcagctaaagagggtgccggtggtggggtctttctaccgtggcagaaaacggaggcacccctcttcttaggggttcctaggaggacaactgagccttcaatgcctcaggttatttttctgtaaattagtattattattattattagaaacacggtctcgctcggtcgctcaggctgatatgcagtggtgcggtctcagctcactgcagcctcaacctcccaggctcaagcgatcctcctgcctcggcctcccaagtagctgagattacaggcatgtgccaccatgcccggctaatttttagtttttcattttttgtagagatggggccttgctatgttgcccaggctggcctcaagcgatcctcccaccttggcctcccaaggcactgggattatagacatgagctgctgcgctcggcctcatctgtcaatcaataacaaggatgacactgggaagcacaggtcaactgctggtgtcccaagccctgctctcagcactccacagaccccaggtgcctaacggccacctcatctcagcacagaaggcagcgtcatcatccccatgacacagatagtccagtcacctgctcccggccacacagctgggaaggagccagtgctccgaggtctatgttccaatgtaaagcaccacactctccctcccacccttctctgaaaaatgggggctagaacaggaccactgggtgctgtgagcatgaacgaggtcatccaatggagagccttcggtgcctcccaggcccagagcatggttcaaggcccgtggtgctatttaagagtttctctgtgctcataaaagagcctgctgccacggggactggctgctgctctctgatctgaggatgggcaggactgcagctggggcctgggcattcccatccctgagcaagatggcatcactttacagaggagaggtggaggcccccatcaagaggaggggacctctgccccggcccatcatcaatcttgcgagggtccttgactgtgctgcgacccacaccccagtacagggtcctgggagtgtgctagggagacagagacacaggtctacgttccaggcctcagctatggagtcccaccatggcaccccgcgggaggccgtccctcctgcccactctgtacttgatgaggtccacgcctcctaccgctgcaattctgttgaggttctaatgagacggggtcccccaaatgcagccttgtctcacagggtggtgacggggttggcagcagcagggcctcctctctgagattctcagcaagaaagtgatgccaggaggcaaaaccgtcaatcccaggatctgctgtcagcgttaaaaatagggggaaatgtgcctgactgccagatcccctgccagggagggtgctgcccccctacccaactcagaattttaaattaatttaaaattgctctggaacgggggaccagcactgaaaacctgcccgagcatctctctgcgctcagcagcgacgccatccagggtctcatctctgctcctgaatttcccatgctccctctcaattcactccactcaggttccgagttcacaagcagagtctaccacgcaaactctcccacatccccacagagaggaaccagcctggctttgcctggggtgcccccacccacccagtcctcatcatctggctgcaggggtgggccaagagccagtccagggcctgcccagcaaggcctggaccaaagaggggggcagggcttggagacggttcccagtggaggaccaccaggagaccacgtcctcccaggcttcacggctacaggagacctggggagcccagggctgctgaggtgaccgtggctggaggggaccagccagctggggtgtggcttcatcttgctagaaggcatggcaatgcctgcggtaggaagggcggccccacacctattcccagttcccaaaaggagtctgaggtccgctgggcttcatttcacagccaatgaaacagaagacgaaaggccctctcaggacagccttctctccacggaggcttagcgacagcaatcttatcactgctgcctaaaaaagaagccagaactctggatttttatgtgaaatctcctgattttaaataccagcaacgagttcctattttatcaaaatgtgccttacagcatgggctaaaagaatctgcccgtgagccgccaggaattgtggggtggggggtttgaaagacgggcaatgtcagggcctggcgggggtgatcaacccacccgttcccgccacttcccaaagtgagctccacgggaccctggagacccttgaagatgactgtgcaaaataggttctacagtcatgtttgggaaacgccagatcaaacaaagctaaggggcttttttattgcaggccttaccaggaccttaaaggccctaaagtgcactgcaggccttatcaggaccttaaaggcccttaagtacattctgagggtccaggaaggaagtaaagcaggtagcgcttccaatgcgatttgaccacagacctgtgctttgcagagcagccacggcactcactagaatccagcacctttaccttgaaaggtaaatggcaagtgtgcagttcagggtccgagaagcttgggcagggatgtaccacgtccagtgatgcaagccaccctcaactgtgcagtctggctgtgatcttaattacagaatgggagagccagtcctttccccgagcaagcaagcctgatgccagcttgtttcaggaccaccaggaatgtcaacaagtgcatgatgctgggagacaaattgagcaccatacagacagctgggcctctgagtgggtgaagggggaccttgctctgaggcttgatgctgcgtgaatgagtcagagaaggatgtgagtggtgcccagggatgctggctgcagggccactgaaaatatgaatggtagaaacggcctggacctcacactccggaatgttcagacataggggcacacaccccctccccaccaggacacaaggcacaattaccaacaagatacatacacccataggcagggtgtgaggatgcatacctgaaattccagctactcaggaggctgaggtgctattgtttgaacccagggatctgagaccagcctgggcaacacagtgagaccccatctcaatatattaatatgtatacacatgcatgcatgccaatggctggtctaaaaaggtgaggtagagaaaaagacaccaatccacaatctattctccctagatcacatctgtgtgaattctgtctacgggtgcacaaatggggctgaacagggacatggaacctggaagtccttctctgcactggaggccagcaggctgtggcaggctagtgtaggaagtgggtgcctgggctcagggtggaccccagagccaactgtactagagcataaccctgggcaagtgcctaccctttgtcaaatgaaaatacaagggatcactgtgtgagaacataacaccctaatatacatgttagcatgcagtagccatactccttcctctctttgaattttcttatgagggcatttatgtcaaaagaatgaaaccacagtaaaaaaaatatgcaaacagcagtgttgggtcaaatctgttaatagctgccatttatcaagtctcctggatggtgatctggggtccatgatctccctacgttatctctttttttaaaaaaaatgtttttactcatggcaaaatacatataaaatttaccatgttcatcatttttaagtgtacaggtcagtgacatcaagtatattcacagtgttaggtgaccattacaccatctgtctccagaactttttcatcttcccaaactgaaaatgctgtccccatgaaacacacatgccctattccctctcccctagcccctggccctcatcatcctaccctctgtttctatgaatctgacgactctagggacctcatatgagtagaccagtacaggatttatcctttagtgaccagtttctttcactcagcacagtgccctcaaggtctctccatgttgtagcctgtatcacaacctcctacggttctccttcaatcttcacaacagtgtcagcggtcagtactcaggtgaccagatgggatcagagaagccaaacaacatgtccaagatcacacagctgcacctgaaacttgaacctagagatgtctgtctccaagcttccaccccaggtgttatacctcctgcccccaaggccagagaagcagtggtttttgatgcattttttcaagcaactggctcactttacccaaatgagatgctcatactcactgggggccagggtggtgtggtttaccagctctccctcctgcccatcagacagtccctaaagcacctgtgaggaactctctgggacagtgtgtagaaaccataccaaggatggatcctcagcctcccctctgccaagagccacgtgtcctcaccatgcacgcccgagctgagctctctcccaaattccaagatctaagtgtagtgggggcttgggcctcgagtcactgtgcctgcagctcccgtgggctcctggggagagtaacttatgactctgaggcacccggaccttctagtcagttctgaatcccatcagactgctggcgaatggggagaagctgggaaaggtgacctcacaaggcagctcctgatctcagctttgggcaggggtccctgagtccagaccagctgaaacaagtacccgagagtcctgacaattgtgctgctgggctctgcagccctgacaaccccttcgccctccaagccacacattttccacttttaaaatgggctcacggccactcttcatgcttgctgcaggggtagagtgagccaacacaaatttggagcatccgtaccccaaggtgacccattaacagtggctgtggctctcacaggaaggctgggacccagccctgtagggactgtcagtccctggtgagaattcctgaatcctctccaggatccctccctactctctggactttccacttcatggagcccttaactctcagatccaaataccagagccttgcagaacaagaacagactttccttcagaaaagatcttctccccaacaaaggcacaagaaagggctgttgtagctggggctcctaattgtcccccacttcctgttctcctgtcttcctctgaaatgtaacctggcccttcatctggtcacctggctgtccacaaagaagaaggtttaagaacatggctgtccacttaagaagggagctgtgtgataagatcctgaccactgggacataaataaaagaaacaggtccacttaaggaaagtgtccttataggaaaagggaataatgcctttctcctgcccctttctcctttctgctgattggaatgatgatgtaatgggtggaggtgaggcagccgccttggactatgagggcaattgagcacggagtccacacatgatgaagcagtaagtcagaagaacatgcgtctcagacaccacagaaccctgcctcagttatggaccacctagctggacttttatggaaaagacaaactttttaaaaaacttaggatttttagttactcacagccaaatctcaccatgactattagaggctagcaatgccaatttagaaatacttgagagagcagtagcatcgttattaaggacccagagcttggggtccagttggaccatgcgtggaggttcaaactcttgctaatcatcctgagtggatgcaaaagtcagagcctcccggcccccaggctggtaaagtgaggcagactcataaacgactgtgatagaatgtgatcaattaataagaatcactgccccatgaaactctgccaggcagtctgttcccattcccacctactcctgaaagccgtgaaaataaaacacagtcccttttaaaaccaagaccttctgggccactctgtgcccagggaagcaggactactgcaggagtcccctggccgccggggaggagcgtgggcagggtctgcagaggcgagagagagctcggactcagacatgacacacggcccacctgttagagcatatagctcctcatcctgctgtttccaaagcatttgcacagtgccagattgtacagaccacaaagaaaactggctcctgcttagaagctttaaagaaagaatattgggagagcgaggaacgtaaaccccagtcaacttcaaggccatcccagagaagcccttcagaaagaagtttcctcagaaggccatgcaggggctccacggggcctgcaaagggtgttgtgtttgtgggatgcagaggccagggcaggagggttgcaggggaagggcaggaagaacgggctggctgtccatttccagcaggacactgccacagtctgcactccacgaaggtccccaggtttctgggggactgtgtgttcctcaagatccatgactggctgggcacagtggctcatgcctgtaatcccagcactttgggaggccaaggtgggcggatcacgaggtcaggagttcgagaccagcctggccaacatagtgaaaccccgtcttgactaaaaatacaaaaattagccaggcatgatggtgcatgcctgtagtcccagctacttgggaagttgaggcaggagaatcgcttgaacccaggaggcggaggttgtggtgagccgagatcatgccactgcactccagcctgggcaacaaagcaagactctgtctcaatcaatcaatccacgaccaggatggctgtgctgttaggaagaagcccaaggtagaggccaggggaggggttgccttggcaaggccttgagtctccacatcactgtcagccagaggaaggcaacgttccctgaaccagtgggccacgtgggaagttctgcagagccccacaaccctgccctggggaagcagagccctcaggcccactcgacaggccatctggggtgccccctgctgagacaccttcagtgcctggcattgggtttacgggagacagcaatccttggcagggtcctcctgggctccttagagcctgtggggagagtgaagttgggggaaatgaaacatgagcaacactccgtgagctctggaaacagagccagactctttctagggagcagacactggaaactccagccaggtggacctggaccaggcgtcccggcgcctcccacgggccctggagctcagagcacagcttcctgggagagtccaagtgcgggagagggtgtgagtcacagcggccgtggggacagacaagaccctgaggctgcagtgaggctgagtgcgtcggccattgtcacccagtgaccgagagaggtttgaagcggactggtgctcagttctgggtgcagccttaagcgtctttctcagtctctttatggccaggggggatgcctctcagcaggcagggcaaaggcaaatgtctcctcccaacagctccaccagcccggagcgtgtgatgtgtgtaggatgcttcctgggcatctgcctccactctcagtaacgggagggagacagagtgaaaatacaggatgcgtcccatgttcctggagctgccgtgaccgcttaatacacaatgggtgacttcagacaacagaaattcattctctcacaatcttagaggccaagagtccaaaattagggctgtggcagcacttcctccctccagggcctctaggagaggaccctccctgcctcttccactccattctctgccttcgtctgtgtgtggccttcctctcttggtgtgcttcagtgggttcctgtgtctgaatcccccctccttcttcttataaagacatcagccattggtcatactaatacagcatgacctcatgttaaccaaaccaattaaacccacaaagacgctatttctaaataaggtcacattctgaggttcaagttggacatgaaattgaggggacattatttgacccagaagaaagaccctgcagtgttaacagtgattcacttggggagtgggggagaagaaggtttggatgattttcatatgtacacgcatttaccccttgcttttgtgtaatttctacgaagaccacatattacctctctattcagaggcaaataaataatagtatatttttgattaagaaaaaattacttgagatctcaaaggtccttgttgactgtcatgagtaggaaagttaccaatgctaaaaatgctgagatcgaatctagtgagtccagcagagagaaggctgctggctcatggcccaagaaacccagtgccttgtaactgtggctagtgctgttactagcactcagcccagccaacaaagttgagagcttgagcaacaggaaagtgaagtgagcaggtgcctcagattccacccccagtggcccacattcagccctgtagcttgaaatccaactgagcgcatgcatggctggattgagggagagggaccaaggtccagagggtgaaacacgtgctttccatccaggcacaggcaaggaagggccttctggggaaggagatgcagaagtggcccaaatggaagatggatgcaggcccacacagtgaaaggtcccgccaaagctgacaagcacatgaaggccagtgaaatgtccctctctgttctcaatggggagcccagggagaaacacccacagctggaagcaggcaccacagggggcaaagctgctggggtgtgagtacactgccccatggcctctggggtcctggacaagccctctgtccaccacagagcagggactaggcactggtctccctactacacctgtgttgcacgcagggagtgaacagcaagagctgtactttttgtttttgcagaaatccagatcacggttcacccacgactatcagaaacccacccccagatgttcatgactgtccatcaatctaggaggtctgggcccggcccgtagtcctgaaaatctggacactctcagtgacctgctaataagaagggacagccatttggctagatgccagcatatggcccagtggctctggctgtttgcacagcaggctcggctgcccctcaatgacttcatgatgagggataattaaaacagcttccctgcacgttctcctccctcatccaatttggtcacatgatgaacaagctcagaggaaattagcaaggtattctaagccctacaggacagacattctagcaggtgaggagtaagccaggtttctggaagcttcccatatctagaatgttgggttctgggcaaattgcccatcagtctggcccaactcagtcacagaaggtttcagatccctcctctttgctcccccaaccccttgctcagatctgatcctatcagctcttccaacaacctccaggcaggtccccctttagccagcttccccttcctgattcttgaaccccaatgttatagctctgaccagggcatctgctttaaaaatcttcaacagctcccatggttagaacaaaagtgaaggaataggaattcctacattcaaatcctggtctccaacttcacaagaggtaacgctaaaccagcagaccctgagggcagagaagctgccttccatggcacagggcctggcatgtggtaagctcacaaaaaatgtaagatgaacagaagagaggaaggaaagaaaaaagaaaggtgggaagaaaggaaggagttaaatcgatggcaggatgggtaactgcatggattgttggatgaatggatggatgggtgggtggataaatgaatggataaatagataagtgaatgagcagaaacactaatgaatggatagatggatgaatgaatggataaagagatggatgaatgcatggatagagagatggaaggatggatggctgaatgaagaaatggatagatgaatagatgaatggatagatggatggatggaaagacagatgaataaattgatggatggatggataaatgaacaggtgagtgaatgggtgggtgggtaaatggatagatgagtgggtgggtggtgggaggatgggtgaatgggtggttcaatgagtggatggatgggtggatggatggatgaatggataggtgatgggatggatggatgaatgaatagatgaatgaatgggtagatggatgaatgaatggatgaataaatggacagatggatggatgggtggatgggtgagtgaataagtgggcaagtgaatgcacagatgaatggatgggtgactggatgggcagatgggtggttaggtgggcgcatagatgaatggatggacagatagatggataattgactggaggaaggaatagatgaataaatggatgaatgggtagatggatggatggataaattaacagatggatatttggatggatgaatgggtgagcagataggtgggtgggtgaatggataatgagtggatggatggatggatggatggatgggaggatgggaggttgggtggtaggtggctggatgaatgaatgggagggtagatagatatattagttgtatatataaaggcaaccttcccctcttggactgttttgcccatctattatatttccttgcctctagggggtgtgagtttaaaccatgtttgatacattatttcattaaaaacaccaacagccttatgagggaggcatctgattcctgctttattgaatcagagaatttcaaggatcttacacagagtcccactcaataagcaggtgggacagctggaattcaaacatctgccaatctgtgcccaggactctttgcccagtgtggttctccctgctcttcccagccccaagcatcatttgaaactctggatacacaccagatggacacccctggctggcccttccttaacttctgtctacctcgtctctatccttagtctgacagggttggtgatacctgttttggacttacatctcttcctgctaacttatgctctctgcaacagcctgcctctgcgtgcaaatgttcctgcaagagggattaagcaaacatttccctgacgatggccccagcagccaggaggcagtctcaatagctggtttccatgctttgcataaacttcagtggactccaagggctggagcctgagagcccaatcgggccacaggatgactgacactggacaagtaagcgggcctcagctcccaacctacaaaatgggaataatgcaagtagcacccacaaagggttgttttaggaatcaaattggataatgcacaggacttagcacccagtaaatactcaatgtacggtgacccgcttttcaaacacctgctcctaagcaaagcgttctcaacctagccacaagcaacctggaggctaagccctcccaggctgactctggccttccctagcacagggctcagtcatgtgcccaacagatgactgctgggtcttggatatcctatttccttttcctcaagtggcctcacttcctgataaagaccttggtgcctttctcaggacttgggagggccaagcccttgggcagtgcccaagagagcacaagcagttgacatacgggttctgctgcccaccccatcatcctcagcactttagttgacgtgatggcccacctcttgctattaggggcatcacggagcacaaggggagatctaagcccacaagacttgcaactctctaggaagaactgacggcagccttagcacatgacatcacgaagacacaatgacccttgaaggccaaaaatggtggtaacagcagatcacagcgatggggcacttccatgagtcacacaccatgttccacggctcacacacatcctctcaagatgctgagacccaggatggggctacatctgacctagtgtgtgggtgcttcactgcagcctccacccaccccaccttggaatccttgtactgtagcatgatggattatctgggcctgtggcaagttgcaagacaccatttggagagggaattattcagatcatagcacacccatgacctgtgcttctcagctttcatcccagcccaaatgtgccaggagctaaatttagggtgagggttgtacccagcctgtgctctgtcaagaaggagccgagtgctgctgcgaaaccaccccagagcatctgcttcctgtcccctgttcataatccattttaaatgaagtcatcaaaattcactgccatgttcatataaaataacagcagcaactgccactaaatttgtattgcgctgtgcggccaggttgctcttctcttagccatggccatgtcaggtaggcagggtgcatgtgatacccatgtctgaagctgcaggcatggcagtgtgccatgcaaaagcccatggcctcctgtagtctttgccatccactcagtgggctagactggaaacccaggcatgacctgcacacccaacacctagcagcaaggcagattccaacctgaccatggctctccagtctcatgcccatggctgagtatcccatggacatggcagcagccttccagtgtgagccctgcttccttccttgctaaagacagttatccacacaacagccaaaggattcttcttaacaacagcaatcatggaaacttctttgttaaaactccttaaaggttctccccatttagaacagaacccagacccctgatttagaacatgaggctcaagggacttggctcctatctccagcctaactttactacctcttctcctggactatgcacctcccactcacacctccatctggttatccctggcatctgggagaacccaagcaagttctttcctactgcagggtcttggccaaagctgttttcaggaatgtgctgtccacacacctgtacatgctcgtccctcccaaaggcattcctgagcactttgtttttactactgggcagtccaccttgccctgagtctcatgctgtcctttccacactggagcactggtgttgggcctagagtcataaaatgtttacatacagcactgctctggatgggtgggtagatgaatggagaggtgagtggataaacagaatggtgggtgggtgagtagataaatggataggtcggtggatgaattggatggacagaatgaatgtatagataatagagagatgaacagatgtctggatggatgggtggatgagggtaagtaggcaagtgggtgaatagatgtgtagataagtagatggatagtggatgaatgaataaatggatatacagatgggcagatggatgggtaggtgagtggagggatagatgaatggactgatgaatggatggatgaatggagaagttggtaggcaagcgagtaggtggacggaaagatgggtagatgggtgggtggacagatggatcgatagatggataagcgtgtgggtggatggatggatggacaaatggatgaagtgggtaggcaggtgaatggatgcatggaaagatgggtaggatggatgggtgagtggatggatgaatgggtgataggtagataggtggggatggatggactagtcagaaaagtggatgaatgacatcataggtagatatcatcacctatacaactgagtcagagaaacttcttcagagaagctgagaaactgaagacacagaaccagcaagtggcaaaacagggtcaagtccctgcccttgaatgtggtttgacctccacgaagtgagaaaacatgccaggaagcttgttacccacagattggttctaccctcgaggctggtgtccagcatagctgaagagatgcactaagccctctttccctatcagggctaaacacgaggacagatgaccagactctggagcaccgcacctccagggacagtcagaaaccatgacccggggtccagctcacagttgggattgatcaatgggatgccaatgacttctaaattcagctttggcaacaaccccacagcgcccaggcttggcagtcatcctcgtgtgttcctcaaagaaccccgactatctccctccctgcggagcaaacatccccacctccaacctcccccaacatccgaccctgtcccttgctcccttcacatggtaggagtccctttctctcagaagcctctttgctccagaccaaggtgaacacagcccacctgatcccgccacctccataccctatcacacctggtcaaaccttctctacccgccccaaagccccatggctatgagttacttgggtgcgggggattttctcagctctgtacttggcacccccagactctcatcagcctgaatgtccccttaggccatgttatcctcgtgcacacctgcccatcagatctctcccatcacccattaaggtgacgggtctctttatgtaaccccaagaaagaacgttttgaaggtggaaattgtctgtggaatgcaggaaggaataagggaataagaattagaccaacagagtgtgtatttcgtctgtccatcttcaatcccgatgtgtgcagtgggagactgcgaggtccccagggactgggactcagtcttgcttttctaccagttgggtgaatgaacgaggacaaatgattaagcatttctcccttactctctcacttgaagaaaatggatgaatacttgtcctttgacctctcaaagtcataaaagtataaaatgaaatgcgagcatgcatttatagttttagaaatacacgcaaggggcctggcgcgatggctcatgcctgtagtccctgcactttggaaggctgaggtgggaggatcacttgggcccaggaccaggtgttcaagaccaacctgggcaacatggcaaaatcccatctctatttaaacaaacaaacaaaaaagaaataaaagaaaatgtgtatgtgaatcataccacaaagccccttcattccaaattctttctgcaggagccgcgtgcatctcaggggatactctcttcccaggagccagggaaaggacatccctcgacctgctgggcacacggggagcagcgctggcctttccgggcccccttgtgggagggaagcattccgacctgccccctctgcaggcactgtcagtccaagctggcagccaccaacaggcattttaatcaggcccaggttagtaaatcctgccacttccctgagggttttaaccctgcagttggaaggtcatgtttaacagcaagacctactattatgcctctgtttccatgtgaaaataaatgagtcccacacctagtaatggttttgctcctccagtctgtcctcttaaaaatgggtcgtgaaggactaatgcttttaaaacactataaaacaaggtctgtaatggctctgatgcctcaaaagtgtattaagatgaaaatttatgttttcctacaccacatggcattgaaatacaagctctaaaataagaggcagaattattgtgtgttctgacaaaaaatccccagccctacctgcacctgaacttgcatcaaaacatgatttccatcaaaattcccatcaaaagtcttatttggtataaagcagtctttttgggttaattttttttttaaaccatgcaaacatccatgtcagagttaattgcactgagttggcctcctctacgagccagttaactctgtagctcagggcctggggtttgtttctttgactcctctgggcaggtgcaaatatagcaacctacagttgcctctgcaggctgcagggtttgtgccttgagacaatcccagcagatgctgacctcaggccacaaaagaaaggcagggaataagccagacctcagggagctcagagctagacaataaataagcacaggaataaatgagtgatccaactgggaggagaaccaaaagaacaaagcagagatgtgatcagttagaagaggagcagagcccaatttggatagggtggtctcggaatagtgggacacaggtgcagccaaaatgcagagagcagggggcaggggcaaaaaaaaaaaagtgaaaacctgggaaggatcctgtcgcactgggtctcccaggccagggggaatctggtgtggagcccaacctggatggactccatgaggtgacacctctccccacgatgcggctgtctctgtttcagctgatctaagcaccagacactgaactgatggcacacctgcccagtgcccaggtgccagctccccgaacacagcctgacctcatcccagttcatccagattcctgctgcaaacctgctgcgattaagtgtctcagggggagggtgtgtgacacaatctgatttatggtctttgttgaaagatccctcttcgagctcctggggtggagactgggttgtaggtgaaaggagtagaatgtggagcctggctgggaagctactacactggtctgtgtagtctctggaatgggcttgagtagagacaatggaaatggaaagaagtgcaatacgtcagttggtatttggagcctggactggactggctgatggacaggactagactggctgatggactggactggctgatagactggactggctgatggacatgactggactggctgatggactggacgggctgatggactggactgctgatggactggactggctgatggactggactggactggctgatggactggactggctgatagactggactggctgatggacaggactgtggatgatactcaggcttccggcttgagtggatcatgaacaaagagggaaatctatgtgcttggggtgggggtggggagcttggttttggacacattgcacattttggatcctttgggattcccccacgggagtagtcaactgggcagcaggacacagtctagagtctagtaaactggaggtaagaatttgggaggaggagacatgggtgtggggctgattttgctgaagtgcccgtcttggggctcttggtctcagcaggagacaagccgccttacctcagtgattcagggactcagggacatgggctaaaaggtgtgagctggtgggcagggcagaggctgctccgcaggacttacggagcaggggtagcatccatcttagatggcagggatcaaggggtttttatacctgggtaggtctagagaaaccgtgaacactgtcacattccagggacaaatctcaaaaataatttgtaggccagacagcaggtgagagaggtccctggtcaggaggggttggcctgggttgagtggcccactggtgtgggctccatgaggtgacacctctccccatgacatggctgtctctgtttcagctgatctaagcaccagaacctgagctgatggcacaactgcccagtgcccagatgccggctccccgaacacagcccgacctcatcctggttcatccagtgctggccctgtctggacgagccccaagcatcctctgctcggtgccctgggacgcctgtgaactcctggccacggctatgtggtggaagacacggattctgtggggggttttccttatctctaggactcgcccacctgctcccatgcaaatcctcattttaactctggatcccagtgaaggtacaatttagagtctaaaataactcaggctggtgcaaacggagctttgctaggcctggtgcctcctttcagtcaacatctggtccactctctctggcatcctgggctgggggtatggggaagaggcactggcaccccgtttcggcctctttatttggagatgagatctttacagctacagagagtctttaaagtggagtcactcaggtaggtcctcatccaacaggagaggtgtgttgtaagaagaggaaacctggacagacaggaagaaaccgagtgaggatgacgacagccacctgcaagccaggaggagaggcctcaggagaaaccagccctgggacaccctaatcacaggcgtccgcccccacaacggtgagagaatgtttctgataaaaccacccagtttttgatactttcttatggcagccccagcaaacaaaaactggctccatggcctcccctgtcctggcccctcagtctctacgacctgggcaccttgcaagcacaagaaagggaccctccagttcggggtgcccacacaccttgctttcttccttgagctctggtcaccaaggaggcaaaggggagagaggcttccaaggggcccatcatttggaaagggaaaaccagcttctgttgccgtggcaactccactgggatgctctgctatttgcacattttgaaattggaggtgggtagtgagaagggaaaaaggaaagaaaaattgagggagatgagagtatccagggcaaaagaaaggagagaaaagcaaatgaagtttaggaaaaatccagcttcggacaggtgaccctgacagtgcttaatgacctcagatgagtcccagggccgcggggacttccccattaagtcatggtggctccagccaatgtcagcccaggtcccccactgtcagagaggaaacagaggctcgaagatgagaagtgccctgcacaaggtcaccttgtgacttggaggattctccaggtaaaagcagccgtattgggggaaggcctctattcttgtaatgaaccaaacgtttgtgccaaccccccaaattcatatgttgaagtcctaactcccaacgtgatggttttatgaggtggggtctttgggaggtaagcaagtcataagtgtagaaccttcataaataggattaatgtccttataaaagggacccccaggacctggatatggtggtgtgaacctgcaatcccagtgctttgggaggctgaggtgggaggatcccttgaggccacaagtttgagaccagcctgggcaacatggcaagaccccatctatacagaaaatacaaaaattagccaggtatggtggtgcacacctgtagtcccagctacttgggaggctgaggtgggaggatggcttgagcccaggagtttgaggctgcagtgagccatgattgcaccactgcactccagcctggaaaacggagtgagagtgtcttaaagaaaaaggggccctagagagttctctggtaccctggtttcagacttctagcctccagaatggtgagaaataaatatgtattttttacgagccatctagttcatggtactttgctgcagtggcctgagcgggctaagaccttcctccttggagatcccatggagtggggttcaaggggtccttatgatacccgtgagaggatttgagtcagacctgcatcccaccacaggctctaaggagagactcaacttctagggtctggctggcagacttctctcactggacaaaccattctagagaaaagcaaagatgctgcagaactaggcgacgtctaaatttagcctcacaaagaatctagagcacaggagcagggaaatactattctgaagggacaaggagaagaatacaatgggcccaggaggctgaattcaccacgagtaagggcacgcggggggtgtctgagaaagtgcagaagtcaggtgccggaatggccaggctgagatgcagctgcgcgtgcctcattccccaaccgcccattggatggaggtgtgcctcagggtggggtggggtggccgggcaggctcagcagcagagggtggggccacaagcatccatctccaaaattgctcttgagtctgctagcaaggagccacaggacactgcctcgcaccgccttctgatgtagctggacaagaagtgtgttcttcttccagcattgaatcagatcctgtctctcaaaatgagcctcagatagatagattcattcattcattcactcactcactaattccttcactcaccctgcagaaaccaagcacctgccttgtgctaggtactgctctacccaagcatcaaggaatatgcccacagtgctgcccttcctcaacttcaaatacctggctttcttgggtcgtggcccctccctggcagtcccaccctcgggcactgctcccctgggccctctcctccctggtgctttctgcagtttcttagtggggggctgcctggctgttctccagggtccatggcctgtccagcatcttggtcaccaattccgcgcgcagatgcctctgtcggaaaggcctagggtggtctccactttctggattagactctcacccccaggccaccagggagcggtctgctgcagtctacaccctcctggtgagacttaggctccatccagacagcaccaccgagtggctcccctgccatcagaaggcaggggcagagagtgcagctcagaggagccacagcccatcgcaccccgcggcaccaaatggggggaaccatttgggagggatctagtcacagaaaatggaagttgggaaccgagactcatttttgagagaaatggtcaaaagagccacacccggctaattaggattctgagaacgagatgctgctgaaacaagaagggaacagataagaccaagaaacatcccagacctaacatttggctacaaagaaggagtccaagtgttcttttgtgttgatgttccggaaactcaaaattgcactttgctgcagacgtcagtaactctagcaccaagggttcacggagcttgcatttgggaatccgaggagagcaatttacaaggagtaaggataaaatctaaagtcctatctcagtaggaatgacttttcttatcagttcacgcaggggcccggagacacacaagtcaacaaataggagatttttgtgatttctaaaggtccacttttgctggagttttcctatgtctacccggcaaattttcatctccccatttccctaaggaaacatttcttaaggggtgacctagaggcagccactctctgcccgcacatggactcagcaggagcttcatgacggccctcgctggtcttgagagcatctctaggtaacacaggaggacagatcaacaaccacaccagcctctgccttcactccctcgctgtggctctcaccccagcagacaaggcctggggctgacattccatgaagccaggagccaaacgaatgatatgccgtggacaccaccatggacagcacagaagggaaacaggacctcgtagcccagagggatttgaatccaattcggtgtatttaaaaaaaaaaaaaaaaaagagagagagaatgaggtcccttggggtagtggatccccactctgactctctcaagttctagaatacgaaggtgccatcctgaggtcagctgtctcctatccgggtaggggtaggtggagggtgctggtggaaggacgctcttgtccgagtcctcagtaaatcctgaacacaggggaggaccaatgaggagagtgcacacgtcttggctccacacgggcagcagggccgagagcaggtccggaggccaaggatcaggccaggactccaccaacggaggacgagaggcaagagccgctgttaacagcaaacagctatgtccactgctggggagtacggcatgcgcatgagggctgaggggtggggcaggacgggccaaagctgcctgagccagggatgccttcacaacctcgctgccccagccagaaaagtctgcccaggccaccggctcgtgaatgtggggtcagctcagccatgttccctcttgagaatcgacgctatagatttgtattcattacccactgaattcagagccagccagacatccacgtctcaccccaataaaagctttaacatttacccagcggcacagagtcattattctgtgacaatattccactgctgacctttattgcctaggactctctgtgaagtttccaaggaagcatttcagcgttcagcacacaggacccaggtccaccgcctccactgctcctgcaccggccggcccccgcctcccgcccatccatctctgggctgtttgcctctgtctggacttcatgtactgacagtgtgtttgctaccacttaattccatcactgactgtgcctccctctaaattgatcagtgtcaattctgggcaaataattgggtggaattaccagcgggtccacccgtgctgattatgcaaataatgtacgccgtcaccaagggcccggcgctggcagtaagtgtctaaactccttagcatttgacagcataattgaagacacaaatatgaagcctaatgaagagtttcttttctcgaggaagactccctcgttctcactttcaatggcttggcccagagggtgcaggtgaagaaggtgggtcgcatagacacagaggctgagggggtcggcatacggacacctgtccacggacatggggcggtgtgatctgctcttggacaaccccagggtcataacctgtgcctgctatgataagcctggtcaagctggataaactcccaagcctcggtttctccatgtgtaaaatggaaataatactataataaacaatgacaacagtcaagagtccctctaccaccactgctactagctgggcacgaggctattgactattatttatccctgtgatacagaggaggcaactgtggcacagagaggttaagtaacttgtccaaagtcacacagcctgtgaagggcagagtcaagacacaagccaagaaggtgggttccagagtccaggctcagcctatggactgagctgggccatgtccacatcttacacagtcagcctcacaccccacgggggcagcccagggccccacccacacagggagcacagtcactggagctgccacggccagtcctaagtcccatccgggaaagggctctggcacggaaagccctgtttggacacaacatgcggcctcctcatcctcacccattctcttccacaaacctgcccaattctcacccagggtgccaaagtccagaggatgttgggggagggcgtcctgcagttagaagccacatccaggtgggcgctgagtgctagaggctgaactgtgtcacctgcaaaattcatgtgacgcaggcttcacccccaggatatcagcatgtgtgcgactgtatagggagatgggctttaaagaggcaactaaattaaagtgaggccagatggggcaggtcctaaatccaatccaactggcgtccttacaagaagagatcaggacacagacatacagagggatgaccccatgaggatacagggagaaggcaaagtctacaagccaaggagagaggtctccggaggaaccagtccagagaccccttgatctcagccttccagcctccaaaacggtgagacgataaatgacttgtgtaagcctccctgtctgtggtgctttatgacggcagctggagcaaactcatacaccatagatcccgacaatctgtcctagaggcctccagaccagcaggtttcagagggaggacaatgtatcggtccacaggccacagaatgcttgggatgcaccgatcggcacgttattaaacccactgggaccaacagaactccacacatcccataccagagtgattaatgcttccaatctcagcctgtgctgtaggaggctttcatatttcacggcaaagttgtgcagaccagttggttcatggcaggctgtctgtcccaccttgctgcctatggcctctccaccaagccaggctcgggtatggagctcctgaccgtccacagcactctgtctgctctgtgtcctgggctagaaacctgataaccagcagatacttccttgggttgggcaccctgggctcggtgaccaccgtgtcatcttggcatgtccccatcatctccttgattgtcctcccccagacagggggctcgacggggagtccatggtggtgttgttggaagatgggatgagaactgacactgtggtcacttactgccgcactgggtgctcagtcgccgctgggtcagtgcagggacctcaccaccaattatgtgaatgcctcccctctgcctgaagctccccaggctctgccttctcacacacccagaaaccctcacaaaagtccacaagagtgtccccccaaatccatgtccacccagaacctacgaatggggccttaactggaaatgggtcattgcctccttgcagatgtgatcagtgaggttgcgacgaggtaatactggattagggagggtcctaaatccaataattagtgtccttataaagagagtgtggcccagggcactatggaagaggtttgaggatgagcacagcagcagaatctgagtgctggaggctcacccaggcagagtgtgctccacttcgttccaggggactgagagaaatgaacccggggtgagacccagagccgtcccctcctgcagtccatctgggccaaaatgagagcccaaccagtggggagggaggggcagattcaggaaatagaaaaagtggaaggggctggttctggacagatgggaaaagggcaggtgagcgccaggaaagatctaggaaggtttttgggttttcagttcctgggccataactgagatggggtgcccaggaggaagggccagctggccaggaaagatggggtatgttcactggagctcctgtaaccacagcctgggtgactgaaaccacagggatgaattgtctcatggttctggaggttggaagtctgaggtcaaggtgttggcagtgggggggttcacactggggactgcagggagactctgttccaggcctgtctctccagctcccagtggcctgtaggcaatctttggcattccttgactgacagaagcatcacccagagctctgccttcatctttgtgtgaggtttgctccgagtgcatggctgtggccacatttcattcattcattcattcatttatttatttgagatggagtcttgctgtgtcgcccaggctggagtgcagtggcacgatctcggctcactgcagcctccgcccacacagattcaagtgattctcctgcctcagccacccaagtagctgggactacaggcacccgccaccacgcccggctaatctttgtatttttagtagagacggggtttcaccatgttggccaggctggtctcgaactcctgacttcaggtgatccatccgcctcagcctcccaaagtgctgggattataagcatgagccactgcacccggtcccatttcctctttttataagaatatcagtcctactggattagggcccaatctaatgacctcattttcagctgatgacttctgtaaagaccctacctctaaacaaggtcacactctgagatcctcagggtgatacttcaacatatgcatttgcagggacacacttcaaaggggagtcaggggtctgggctcgcctggtggcaggctctgcaggagatgagtctgagggtccaagaggaggtccagggagcgctctgcaagccaccagccccgaagatcactggcaccataggagcagggcaggatgggcgggggtggggagcagagagcagagcaagggcaaccacagaacctggggccacaccaccttctgagatgagccacatagcctggcactgagcctccttcacgtgctgaggccacatctgtgtgccatggagcctgtgagcccctggagggagaggctgtgcctgggaccctgcggattccccaacacatttgctgaacaagcagggcagggagagaaaggaaagtgaggtcgagacaaatattataaatatgaccatatccctgatggagaagaaagtcaagaaagagttcatgttgaaaggcaacacgggccagacacacctggtactcaggggccctgcagggttttacagcaaactgtggccacatgggggctgggaggggacagccaggaaagaggcacagtccccatctgaatttgactgagagactctttgaagccgtctgagatttccatatacgatttctattaatatttaaggcaagacgcatcccatcctccataacaacaccgtcttgaaagaagcctttgaactacttgaaaggtaaacccagcattattcttggattaagaactcttgttcattcaacaaatacagccccacgacgacatccctgaacaccagagccagaggtgccttggcatgtgcacgctgcctgcttctgcagcagtaggatgatgcgtgtgtggcctgttacgtcacaccgccagtgggtctgggcagtgtcccattgccaattgcgggaggagtccttcagggcacggatgaataatcatgctaagtaggataaataaaaactataaatagcctcaaatcagttcaggtcaagtactactgccaacgagctacggagaaggcattcgcttttcagatctttttgcagatccacattgaaggtagggaactctgtctttactcctgagagctcgtgttggaaggtactcatgagtgaagacagagttccctaccttcaagtttacagaggagacggggtgcacagtggaaaggaggggaaaaaaaccccacacgcatgaagaggaaagacaagtaggatgcaggcttggaggtggaggctcggcgggacggggagaaaaaaggacaagacccttccctagaagcgcttggtggacacagtgggtgcaaacgaccaagtggctggatggagggaagagagaccctcagatggagggaatagggggcccccatacagaggggccccccacagaccagagtcaggggcacacaggtccgtgagctacgtggaatgagagatgggtccctggaccacattacttccggctccctggtgtatctcctccacgttctggccacctgcgggtccctgttttcctccacactgaccacttgaaaactgatgggtggcaattttcacccctcattgtcctaagggtcgtgggggctgctttgcttggtgctggagtctggggccacagtggaacatggcattgattgctaagaggaagggaccccacgatgccctgtagagcccagctcctcggggcaggaggagcacatatccactgtctgccctctccccacactcatgacctccacctcccccagccccaaacattacaaaagctaaagacatcctgggcacctgtgagaaaggaagagcggaggtagttcccacgtccatcctggtgcctctgcctcccgggtggcgaccctcaggaaggtgaaacctgcagcttgggccctgcagtttatagaatgatatgtttgtggttccctaaaacaaagagccgttgccacagcaaccgtggcatcccagcactcagaggctattctcagacactaaacaatgagttttgcctttcaaatgcatttgatacaatttgcttggaaggcattaacatcctctgacaaaacccatgaggaagaggagggcaggtgagagctgacaaggtcgagacttgcagggcttccaggaatcacacccattcatgagacaggagggcccaacggccccagacactttcaataggcaaacaggaaatgggaaacagcagaggggaggcaggcaggatccctaaccttccaacagcagttccgtggaggaggaggggctgcccagaggtgaggcagttgggatccctaaccttctagcagtggtcccatgaaggaggagcggctgccacacaccctttcggggcttcttcaggagagacgttccacagtcccatctggggcagttctcttcttcagggtcactgcaaagatggcagcacaggccagagcccgcagcaaccacttaatccaccctgctcactctgcaaaggacattgagtgcgtcccctgctcacagccagccattgcttcctccatttaccattttttttttttttgccagttcatgaacaactttgctattgtttacaacgatctcatgggattagaataccaaacagtgatgccagtgagaagaccaaataaccttcattcctagcaccagcctcctgtcactagcacgctgggcaagctgccctcaaaaacagctcccgggcgtcagtgacaggaacacgtgtcatcaggaaaaaggcatgatgtaggcaggctgggggcagcatcccaatgcaaagtacatttttgaacagactaaagaacatgtgaacagtacacagaaattcctccatctagccatctatccatctacctatagatccatccattcatccatccatccatcttatctatcaatccatctatctaatctatcctatctatccatatccatctatccatatctatctaatctatctacctacctacctaatctgtccatccatccatccatatctatatactccatctatctatccattcacccatccagctatccctctaatctaatctaatccaatctaatctaatctaatctatctaatctatctaatctatttatatgtaatctatctatctatccatgatttatctatctatctaatctatctattgagacagggtctctgttacacacactggagtgcactggcccagccgtagctcactgtagcctacaactcctgaactcaagcaaccctcctgcctcagcctcctgagaagctggaactacaggcacatgcccttcctctgtatggcaaaattattttcattaacagtcatgtaataaccatcattttattgatttgtgcatcagttttaaaaccaaatattttgaaagaatgaatgtcaattttaaaggtattatccaaatccaataaaatagttcatgtaagcattgaaatctgcatatctgcatttactaaaaaaaaaaaaaaaaaaaaaaaattccaccttgtagttcacatccactgccgtttcaaattttaaacacagatgaaaactccgagtggctacctagaatgacagcactgaaggaacacgagttcactttgtctttatagttactgtgccctcatgtctgtttcaaatctaccgtgtaatagcaggaatggtgatcacagggcatggagaccaggccattccggaccctgcagacttcactccagtcaaaaggctgtagctaagcccactcatgcctgagaaccacatgtaactataacaggcttccccaagttaatgttcatacagaatatggtattcactaaaggatacattataaaaagatgctaatttgaagttcacagatacatttcaacagcaactgtagcaattgcttagatcttagaccaacgattgggggaaggagtattttatcattggcaatttttagaacggggggacatggtgatcattaaaagggaagggacatttagctggctttattgttatttggaattctctccagatgaagcaatagaagtgccctcctgttgcgtgtacctggggcagacagcgtcactcactccgcccccagtagagctctgctttcggaacatgatgataaagcattaatattgcatgtttggtgaaaccccgtctctactaaaaatacaaaaaaaaaattagccaggcgtggtggcaggcgcctgtagtcccagctactcaggaggctgaggcaggagaaaggcgtgaacccgggagtggaggttgcagtgagccgagattgcgccactgcactccagcctgggagacagagtgagactccgtctcaaacaacaacaacaacaacaacaacaacaacaacaacaaatattgcatgtctgggagctgggcatggtgactcacgcctgcaatcccaacactttgggaggccaaggcaagtggatcacttgaccctaggagaccagcctgggaaacacagtgaaagccccgtctctacaaaaatataaaaattagctgggtgtggtgacgcatacctgtggtcccagctacttggggggctgaagtgggaggattatttgagccctgggaggtcgagaccgcagttggcggtgaatgcactgctgcacaccagctggggtgacagagtgagacactgtttcaaaaaaaaaaaaaaaaagaggctggtcacagtggctcatgcctgtaatccaagcactttgggagcccgaggtgggcagatcacctgaggttgggagtttgagaccagcctgaccaacatggagaaaccccgtctctactaaaaatacagaattagccaggtgtggtggtgcatgcctgtaatcccagctacttgggaggctgaggcaggagaatcacttgaacccgggaggtggaggttgcagtgagccgagatcacaccattgcactccagcctgggcaacaagagtgaaactccatctcaaaaaaaaattatatatacatatatacacacacgtatatacataatatacacacatgtatatacataatacacacacacacatatagacacacacacacacacacacacacacacacacacttggctgggtgcggtggctcacgcctgtaatcccagcactttgggaggccgaggcgggcagatcacgaggtcaggagaggagaccatcctggctaacacggtgaaacctcatctctactaaaaatacaaaaaattagctgggcgtggtatcgggcacctatagtcccagctactcgggaggctgaggcaggaagatggcatgaacccgggaggcagagcttgcagtgagccaaggtcacgccactgcactccagcctgggtgatgagtgagactccgcctcaaaaaaaagaaaaaaaaagaaaaaaattatacacacacacacacacacacacgcacacacacacatgcatacacatgcatatattgcatgttgattcattaacggggaagctgaggttcagaggagtgtttcatccatgtgggctgcagcaggtgacaacacttctagggtctgtgcaagtgaaggcaggaaataacagggctgctgctgagcgcagagtcgagtctcgtgaaatgctctgagcaacggtggggtaggggatgttccatcagaaggggccagcatgctgaggcagagcgccctgtctagtggccactccaatactctggtcccgtgactgcctctcagcctgggccatctggacactggccaacaaagggcctcaccacctggaccttggagaattccacaagggactgagacccggtgagattctaacagctggaacacacacatggccctggtgagaaaggagtaactattgcttcctgtcccagccacacaatttcctcccatctcttcctcactgatatttttatttctcttcaggacacagaaaaagaatacggataatttataactaaaggagcaacaatggtgttctgaattattttcccctctttttggaacgcatcaacatgtaatttgtgccccgctcgctggataactctgagagcaggcaggtgttccgagggccccagccagggtcagggccaggaggcctgggcagagccctcaccctatgccgatggccagcctgtgacctcacataagccaagaggcttcctgggccggatttctatagtaaccggccactgggtctgccggcatacgtcgcctgactttctgctgttctattctttggcagaacacccttcccctgcctgctggctgcctggaactgaatgaagccaccgtgatttcagggagagatcccggctcctgccctccccaccagcttcagcagaactctgccctcttgggtcatgcatttcctttccttacttcaccagctctggttgtacacatccgagactccccaggactctaccaagggcctgatagaggggatagaacatgaacacctttggccactgtgattggttcaaggatggttgatacccaaagccatgtcattggctggactcctgaagctctggccagagcaacaaggagtaagaagcttacttactcaaggagtaaggctgaggccaagcagagggaagccaaatatagacacggatagacgggcacattctataaatattccctgcggagaaagtggctgtttctctcctgcaccaggaaagaacaggtctgaatagtcagcaattgactcaacaaatatttgtcaagcacctaccaggtggcagaagccatattggttgggtgtgctggggaaaagagaagacgttaacacctgcctttgtgcagcgtgagtccggcgaagaatgcagagaagcaggagggagagtcagcggttctgagaatggctcagccgccattgacttggcctcaggagcagggcactgggggtcccagacacaggaaggaaggtgtcgcctttatggccttcgctctgtggatgaagtcagcactgcagaaggctgccccatccacatctctcttacaaaaccaagccgcagctccctcctgctgagctgggatgcagatgaatattcatggagaactgggaattgggagttgatgaccaagtcattccaaaggcaggaccctgggaggacctcgacaaggtctagaccctaacactgggccacacctctcaatgcagccctaacttcccctccacatagaagggagaaaattcggaacaaacatacagggcatcatcacacgggaattccccatcctgctttctggagcaatttaccatattaattggctgtggctgatgctcagaaatcatggaaagccacgtttcaacccacaggaacccagggacctccctcgggctgcatggtgggtttggaccctgcctattaagccaatggtcttgcccaactcagggcaccaccatgacggccttcctcgggggtggtcttggacaggggactggcagaggactggaatgggatctgttcttatttttcagcctctacttgataaatgagtccatgagtttgccatgagaggtgaacttcctcctgctccatcaaaagggaccctgacaagctctctgctgcgctacccagggctcaaagcagctcccttcccactaactcctacgagcttgttccagggtcatgaatgaatgctgaacgattttggagaaggatctggtctaaggccaggaatgaggctgctccctgccctcacctccagctccagccagactctctgcccctccaggtcatgtgacttctcctttaccatctctcccccaggggacatcctgaagtctggtcctggggaaggaaaatgtttcctgaggctacgtatcttcctgaagctgcccccatcttggtggactccttggtcagggcagcccatgtgcccggtggtcctaaggacgagggtatactgatgcctccatctggcacctggatccacggagaattggggaccagaatcccatgaactgctgctgcttcattagctgtttaatgtgtcccttctggcttggctaaaagcaacagcacttaggtacatatgcgtacaagttcttccttttctgtctgaagcctccataacgtcttttcacttatgcttattagaaccagaattagaaacctttcctctgtgcaatttaattctacccagcatattcttatgaggctccgatatttgaaatcccaaaaggcacttcaagaaaggactctcgattctctgtctgaattcgggctcagctcaaaagagggtctcaaatgcagggagtggtgagggagagaggttgttatctgtggtggcttctgaggctcagagaggtgccgtggctggtccaagaccacacggaaaattccggattggaaccctcgtccctctgggatttggtcaaacgctttttcttcagctccaatacccaggtgcttttgcatattaacaaaaattaagatctctgtgactatttcctgactccaatgccagtggctagaaattcaggggttgaatcccttgccccaaaggccatgcggggcccccctcccaggcttatggaggatcgatgggctctgacagcaggacaccggcggtgggaccctctctcctggcaccagctgaatggggcctcggctggcttcctgcagttgcttccaggcctggagagccagggactccccagggaagggcacaagcaaggagtcagggaaagcggagtccacagggatcccaggcctctcccaggaatggtgacagagcttcctggcttttgagggtagccagatgtttctccgagtttcaggaccctgctgttgcaactgtgctgtgctgtggcccactcagtggtagatgctgtgcagctctccagtgcgaggcccaggggccggtgctgtgcctgccagggctccaagctccccggctagccttgggatagttagcccaggcaccccaatgtctatcccgagctcacctgctagcctgggcatagataacctgggcagcctgatgtctactctgagcttcctggttagcctgggtataaacagcacatgcaccctgatgtctatgaagccagccataactctaaatgtgaaaaggcaggtgcactaatcgggcatcctggtcgaaagaagggctgtggtcagctggggaggagaccgggcttcgggggctgctggaagagtctacgaagaaagttggggagatggatggaggtgcgctgagaaaaggaacaccctgaacagaggactgaaagatggggcagggacagctcctgcctgtgagctgcctggaaggggcttggaaaagagaaagccggagaggcaggtggagccattcagaattaggagcttctgagacttccattcaagtcacctggaagcgggcatgccccctctgtgaggccaggggcatgtgcccatggaacacagaagtcaagactcttctctgctcctcgcccacccctgggcttgtgccctatgctgggatggggagaccctgggctggggctggggaacacgatgtctgctcccatcagtctgtgtaccctcaccagaacctctgccccactgacgcatagattttccctccatagaacaaggaggactgaaggggctagggtcccagctgccacctgtggataggcatcctgagaggatagagctcccagggccatcagccacatttgctcaggtgcagaatctccaagggggatttctcgctgggtctgtgagtcatgagactaagcaggggttgccaagattcccaggaccctttcacattctgagtctgtgttccctggggtcaccaacttttgggcatcccaaccctgaacgacaattacttctggaagcaccttgagagtctttctttttgttaatagaaacagaatctctgtctgtcatccaggctgaagcaaagtggcccgatcatagctcattgcagccttgaactaccaggctcaagccatcttcccatttcagcctcctgagtggttgggattacaggcctgcaccaccacgcttggctaattattttattttctaaaatttttgtagagatgaagtctcaccatctcacccaggctggtcttgaactcctgggctcaagcaatcctccagtttcggcctcccaaagtacagggattacaggtgcgagccaccttgcctggccaagagtctttctacagcttcaccatgaagcaggtgggtgaatcaggggtacaagatagacacaaatcttaaaacaatggctaatggggttggttacagtgtcttatgtctgtaattcctgcactttgtgagactgaggtagaaggatgacttgagctcaggagtttaagactagcctgaacaatacagggagaccctgtctcaataataataatattaataataatattaataataataataataataataatagtaaactccagggggcttggattgtcctcttctgggtagatcccaataatctttctccccaggtggatgggtgagcacagagttctagaattccagagctcttttgagtatactagatcctttggctttaattttatttttttttaagagaccaggttttgctctgttgcccaggctacagtgccgtggccccatcatggctgtggctgctcactgcagcctcaaactcccaggctcaagtgatgctcccacctcagcctcctgcacccagcaaattatttatttattttttgtagagatagggtcttgctaagttgcccaggctggtctcaaactcctggcctcaaaggatcctcccagcccagcctcccaaagtcttgggattataggtgtgagccaccacacccagcctggatccttaaattcacttgcaggaagggaacccttgctagagaggcggaaaacatcagtgtgaattccccaagcccccagggggacacactgaggaccagggttaaagggtgactcactggcatgatgctggcaggtgagacaaacagcatggaggaggaggaggagggagggagtggggaaagggaaggaatgagcaagggagaaggaagtggaggagagaagaacgggtggctctgctcggcccattcaccaagtgtttccaggcctggtgagctccggggtgggacgggagaggggccactgcagtgtggaaggcaggcagaaaggcccctgggctgtgcctgtagctaggagctgggaaccagttctatagcctacaagcaagggatttaatacatatctcagagtgatggggaaattgattttccttgataaaatggcccagtgaaaaagatcatgacagaagctgccaaggattccttaccttggcagtatctggtcactgctgcaggctgacatgtgaccttgtcattaataggtcacagaacaggagcaggggccagctgggctagtctgtgcagaagcaggcttaggtcagaggtagggcagaccccaaaacttgcttgcaaaatcagccaggagcacaggggtgaggggtggcggtgcagggagaggacggtgatccccacggctttgctaaaaggcggcagtggcttatcctcatgtccacaggaaaggccacctctgtgccatctgtccacgctggcccagcatctgcgagcacaggaagccaagcggctggcctggtcctccaggagggcagaactgtgtggattttgcaggagtgaggggaggtcctgaggaaacagctgcaggtgaacagcaaactgcagggcaggcaggaggcaggtggaggtgagggcgggcttgcctgcggcctgtgggaggggagggcaggagccagggtcccagaggtcaaggtggcagagagagaagcagtgttatgggcagccttagcaggagtgaaggggcggctccggagtcagggctgtcggttccagccccagctgcatccccaccctggggacccttgtcaagtgtctgggctccaggatcctcatcctcctgcgccgaaaacggggcagtgaaggcgcctccctaacagggctgtcattaggattgagcactgagcactgagcccaggcctggctctgaaagggctgaaggcacaggagctatttttgctgctcagatcaaggcagcagttgcctcctcctctgggaagccatcctgactctatgccccattgggatttagcaccccctaatgctggcctcagccttcccaccctgatacctacggcaggtataacataaatgtcctccatctgtaggaaaccaacagccaaaagtccagctcctcagctatggcacaaagtcctggtccacctgacccctggacctggtgcagggcttccatgtggagaaatgacatgggcagggacaatccagaacctgacccgagcaggcaggaccagaccaagagaacaaagggggctgggaaagggggcagaggccacacaggactccgggagcccacctgagagggtgtgctgcggtgtggagcaggacagagcaaaactagggggcccgggaaagcccccagggtgcacctcaccaccctcctggacccacgccggaggcacagagaaggggtgggcaagaccacgtggaaacaagacccggcctccacctgggctaggacatgtgccctgaaagccaggcagggctggggaggcccaggcaaggggagaaggcgctgaggatgctggcagggcacggagggaacaccttacaagaggggaccaggaaggaggaatctgccttggtcatgaccttggtggtcttcagccctctgcaggagtcagagctgaggaaccagaggccaacctgctgggccagagtcctcggtctcagaagggtaggaacagagatctgcagggagccaggagcaggggtgggtggcgctcaggggcaagggaggaactttctgggagaatggatgcagagagcaagaggagaatgcaccagcccatgcttggctcaggccagtgcaccagggcacaccctgtgaatgcccgagtagtgtttcccaccaggctggcatccaccccaccagagagggctcggggctgtgataataacggggtcagggggtgcttctcacacgtggtgggcaggggccagacaggctaaagtcctgcaatgcgtggaacgggcccctagggattgtgagtgacctaccagatgttcagacaaatgcaaaatctgtttatctgcacaacctcctgcgtgttacttagaaacaccacacaaatctgcacagctttaatactccccgaattttccaggaatgcaatgaaagacagcatgggctttgtttggtttggaactttcctaagagctgttgactattttggaagccagccctgccttggaccacacccgacccatggctgagcatctcccagctgctggaggagctctggggttcatggtgaccggattggaagggaatgaccattgaaactgcactgggtcttctgggacagacctctccctgcctacggtgtccggtcccccccaccgagtgttcctgcttcatagaacagtgttcctgctttgtagaacacgatgggtatcttttcttttctttctttttttgagacgaagtctcgttcttgttgcccaggctggagtgcaatggcgcgatttcggctcactgcaacctccgcctcccaggttcaagcgattctcctgcctcaccctcccgagtagctgggattacaggcacgtgccaccatgcctggctaatttttgtatttttagtagagatggggtttcaccatgttggccaggctggtcttgaactcctgacctcaggcgatccacccacctcagcctaccaaagtgctgggattacaggcgtgagacactgcgcccagccaggggtcttttctaaattccacgtgtatgtcagggtatgttatctaagagtttcatttgaggataatgaaggagatgttatacaacactttttctaagagaactggggtctcgtgtggttgggaaccagggaacaaagtcatctcccgtaagtgccctgggagcgctgtatagaggggaaccgcgcagggaccgcatggtgagggtcaggctagggcacagtggagactctctgagcttctgcccttccgtgggggatggagtgggaaaggctcttctctaagggtgagaactgcccaggaccggggagcaaagagctgggagaagctcaggtttggggaagagttcaacccagaagacggaaggagtcgatctctgtgtgcaccatgggggatccgcagtgggacacacttcccagcagccacgtgtccactgtgtgggagtcagtgcggccagggactccgtgtcctccacccagtccccctgaacagtgctccatttggctgaagaggggacaggccgcagggcgggctccagtgagtaaaggggctgcgcaggaggcatggggcaagggtgtggacagaacgtggtaacgaacatcaacaaagacaaggcacacagagatgcatgctgggcaggagctccggcctcactgtcactgcagcatcccatcaggacaaaatccacaattgccccgggagcaccatgtacacagcattcggggcaggccacacaagacggctgatcctccagcggacactccctgggcgtcggtgctggaaatcggccaaatgtaaaaataccctcccaacccaacacgctggccacctgtggcccttacacaaagccggtcaccttggatcccatccccgccagtcaactccgctttacaatttggaacaaaacttctagacagatacgcacgggagaaagtaggaccacagcaacacgcacgtgaccgaccccttcagctgacatgaaaatgacaccaagcaagactccagagtggcagacgaacaacagagctggttatgtccggatgaaaccagcagcccggcatgcggagtcagcaccacacacacacagaccggaaaccacacgcagacttgcacagctcactcggtcccgcgaagagggacgagacaagacgcaggtcagtcccaacagacaggtcacagaggcggccgactgctcccatatgccttgaaactgctgtgtctgttgggggttttctgtccttcctctccggcaatttgttttgaaaatattctatgggaatctggtcaacagctgtgtgactgctgcagaacgctaagtaaaaatacaatcttgactttccttgggagggtttattcttaacatgcacaggaggggactcaataacggggaccccgaccactctgatctaatgaaatgaaataggtgaggatttggggttttccttggaagctgctggttctacttgcaaacacaaaggctattgtgattactgcagatcatcatttgtgtctcattggaaggagcacatttcacagtcaaaatgccaggtaaactgaaatttttcaaatcagatctattttatttcacagcaggtagtatctagcaaacaggtatatttttaaaggatcatggctcaaaatcagcctgaattttactttcacacacacaatcacacaatcacacacacacacacacacacacacccctaacatattacattaagcaatctgtttgaaaacaccaccctctattcatcatctatacatatctaaagcataattatacaggcacccggtcttgaaacctagcaacagtatccaagtattccttcgtcggctaatcaggcacccaaactcacacatcagctcaatgtgcctccttttaaaatataaaaacccctcgcttctctctccatagctgcggaaggacaagatgtatgaaaacaaaccttgttcggttgaggaagaacaacccatgtcatttaatccatctgacagtgcatctccccacaaagccgggcaaaagcaaaaacaacaaagaccgtaaaaaataggttatcccagtccaaagcttatcagctggcaacatgcttaatgtgtgcacgactgtttcagatgcgggctccccggcacccggacagtcttgctatttgggatctccatcccacagaagccatcgtccaggctctatggcaaagcttttataacctgctgggctcatttacttggccggctaaacactggacgacaacaagcaaggattaactgtggtattcacgtccacatttaaaccatcactttcttcgagttggcaaataaaatcaccaaacagaggtcccatttaatttttttttttttttaagaggaaggggacagaaacagcatcacagcatcagacaacagcaacatacatgctggccggattgtgaacagaacgcttcgcggcaggctgaaacctctcttttaaagagatacacttgaatccatttctgggttctacagacctcagagcacccattcatcacctcacagtgttcattgtcttctcccctaaagccacattccagcatcgtaagggcactgatttcctggcactgattgcttctgtgtttgggaaacaaaggatccctcctcagtagcagggaggccacttgatcctttaaagagactttttaaaggaaaacatcccattgaccaggctgtacacggcaagtcagaaaaatgtgtggtattttaatttacccactttgaagcaccaacatccaccccacacccacctctagcttggaatttgcttccaccagacccatattgagaagtgtgacccaaccccatagaggcaaaggtgagtctcacctccacttcttgacaggagaaagctctgcttgtgagcaccaagggtttgccctgacgccaaagcatgagccaacagcctcaggcttaagggacaggcctcgcttcatccatatgtctcctaagctaagttgtataagacaagtcttgctgaagaccataatgcagaaacgccatgattcctgaggttgacagagatagacaaatggcaggtgaagaatctagagtcctctggtgatcatctgacaccacccacccccacccaagaggccaggaacggacaaaagattcaccctgaggaagaaggactacagcagcaccctgaggttatggaggatatggggtggaggaagccaagccacagaacctagaatcaggaagccacatggccacccacgatctaaagcagaaatccagaaatccctggcttgaggactcacgacatcaaacccaacacagcccacttcctccaactgcctcctctcctctgtgcctctgagctcggctgctcctggactctgaaaatgttcgagtcagataaaacattgccctctcgcaaacacactcaatgcagcaactgatttgccaatatgtgtcccacccttgacactcaagaccgggtaccagggaaggcaggtttgaggtcaagaacagagagtagggccgagcgcggtggttcacacctgtaatcccaggactttgggtgaggctgaggtgggtggatcaccggaggtcaggagtttgagaccagcctgaccaacatggtgaaaccccatctctactaaaaatacaaaaattagctgggtgtggtggcaggtgcctgtaatcccagctactcgggaggctgaggcagcagaatcgcttgaacctgggaggtggaggttgaagtgaactgaaaccgctccactgtactccagcctgggcgacagagggagacgccatctcaaaaaaaaagaaaaaaaaaagagagaaagaggatgagagaaaggctgacttggagtgaacaagagctgggggaggagccatccatccaacatgcattgcctgaggccccaccacgtgcctagcacagtggggacggtagaatcagataccatctgtccttgaagaggtaacagcctgagaagacaaaagtcatgaagcaatgtgagttccctagagtgggtggaatggtggtcctcaaaaagatgggcccaagtcctaatccgtgggacctaaactgcaccctcatttggaaacagggtcttttcaggtgtgatgagttgaaggatctcaagatgagatcatcctggatttagggtagactctaaattcagagactggagtccgtataagggaaaggagtaggacctctgagatatacacaggggaagccatgtgaagacagaggcggaggctggggtgatgcatccacaagcccaggaacttcagaggcaaggaaggattcctcccttgggcctgcagagggaaccagccctgccaacaccttgattttggacttctggccttcaaaacagggagacagtcaattccagttgcttaaagccacacagttggtggtcatttgttgtggcagccccgggaaccgggtacacagcccatccctgggtcctgagcaggcccacgaaagatgtggatgagcagaaacgcctggcaggtcctgagaagcaaaggaggagctggtgctgggacgtccggcatgagaaccaccagcgggatttgaaaccgcagttccagaggaaccctcgaccactgagtcagactctgatggtggcgctgggcatctgcattccacacaagttccccaagggactcagatgcaccccaaatcatacaggccgctgggcagcgggggcctcagtgggtaggagagggttagggcaggcgagtcaagatgacagtcaggaccaggaccaggaccaggagtggggtggttcagaagctgtcttaggggcggatgccagcaacatagaaggctcctgggaatggaggatggagagagagcagaggaggcagacgcagctggaagactggggccaggacatgggggagtaggagctgcaacagccagagaagcaacgtgtgtggaaaagcctgttttcctgagcgggtgtggtgtgtgctcccattaaacagcaacagattagtagctcactccacctaggaagggtgcacaggatccaccatccttcaaacatcacttttagatctggggggtagaaggggacagagggacattatcttccatggtcatcccctcccccaaagggcctgggacatgcaaatatttctgaatctccaaattagcacagggtctgtgaaaaaggtgctcaatgaagacttgtcaccaggctgggcgtggtggctcatgcttgtaatgccaacactttgggaggccgaggcaggcagatcacctgaggtcaggagttcaagaccagcctggccaatatggtgaaaccccgtctctactaagaatagaaaaaattgggccaggcccagtagctcatgcctgtaatcccagcactttgggaggctgaggcatgtggatgatgaagtcaagagattgagatcaaactggcgaacatggtgaaaccctgtctctactaaaaaaaaaaacaaaaaaaacaaaaaaaacaaaaaaacagaggccaggcatggtggctcaggcctgtaatcccagtactttgggaggctgaggcgggcggatcacctgtggttcagagtttgagaccagcctgaccatcatggagaaaccccatctctactaaaaacacaaaactagccgggtatggtagcgcgtgcctgtaatcctacctactcgggaggctgaggcaggagaatcgcttgaacccaggaggcagaggctgcagtgagccaagatcgcaccactgcattccagccagggcagcaagagtgaaactgtctcaaaaaaaaaaaaaaaaattagctgggcatggtggcaggcgcctgtaatcacagctactcagggggctgaggcaggagaatcgcttgaacccgggaggcggaggttgcaatgagccaagatcgtgccactgcactccagcctgggtgacagagtgatagactccgcctcaaaaaaaaaaaaaagagttgtcacgggaagatggtgaccacataggtgtttgagctggtgagagtgcaggcatcttcaggacctgccatttcaggtacctgacatgtgcaagtacagcctgggagaaaggatgcctctcctctagcacaggcagtctgccttcctcagcgtatgcgggctcctctctagacgggaagagactggggccatatcgtcctgctcagttggtggcaacaaccaccaacggagtggctgaaaaccaccagaggccgggcacggtggctcacgcctgtaatcccagcactttgggaggccgaggcgggcagatcacgaggtcaggagatcaagaccacagcgaaaccccatctctactaaagatacaaaaaagtagccgggggtggtggcgggcgcccgtagtcccagctactccggaggctgaggcaagagaatggcgtgaacccgggaggcggagcttgcagtgagccgagatcgcgccactgcactccagcctgggtgacagagcaagactctgtcttaaaaaacaaaaacaaaaacaaaaaaacaccagaatttactatctcatagttctgaaggccagaagtccaaaatcgatgtgttggcagggctggttccttctgctggtgctctgggtggacagcctccaaggtctcatagttggaattctttcattctgtgatcccacagaggtgactatgcagcaccaaaagcgtgtcctcctccctccctctctcggtctccatcccccagggtagagggccaggctgcacctcccctctgaaggtctcctgggtgaccatgatggaccctcaccctgacactgctaagagcattctgggaaggagcatcccagtgacaattgaaaatttcatggtgggtgagaaatgccacagaagacattcctctttgaaatgttaatgtggaaggtggaggaatctaggctttgcagagaaaacaacagattctgtgggtgagaagttactctgagccccggctgaggacaggggtggccaggaccagttctgactaaaacatgatgtctctcgaaagctcagaagatgagcacctcaagccaccctcgtgagagaccactgtgagctacaaaggcttccctcgggggctgccaggcagcaccgtcacaccgtcatgaggctggcaccttagtccatcagtccatccattctcagacaactctctccagccgccaggctccaccccatgcggtcttaagcatcatcttcctccagccctaccctgccttctaagcacagctggggagctggctaggagctgacaaatgcttagctctagtaatcctagagcgagggagcctggatgaggaagcagagaggagatacccctctaactatggtgggggggactgccctgttggtgatctgtggcccaggaagcctcctcttccctctggccaccttcccagctctggttctaggtccagcctctatgaagcctccccagcctgccccatcccagtccacactgatgcctgcagctcttgtatggtggaaggtttttctcagcttcaacaaggaggcagcagcatgtggtggttgaaaggacaggttctcaaggtaagtacttcagcatcagatggacatggggttgaaatctggtttgcccaattcctccagcatgtggctctggaaaagtcctgaatttaagatgtcatcggtgccctgcctgcatctccttggcactcactgttcccaggtatgtgcactgcttacccccacaggcccctgcaattccccaaatccctgatgggggtcttggtacccagagggagcacgcataggagctggaactggtgggtaaatacatgaactgcttcataatgaccaggcacaccctctgcaggttcccagaggaccccaggggcctgagcctccggggcccacagagtcaactgctcatgaacacatgtgtacagctggtgccctgcccttccctgacttccttccctaagtccctgctggtgcttcctgtatctcctccacaataaacaacttgtcctcaaatcctcacctcaaggtcagcttctaggggagccccaccccaaatgccatgtcgcctaggctcttctacacatggagaccacaactgcatctggacgtggaggtttgcatggctgtgatgctgtacgtgaagtgctggcctgtagtacttggtaagtgctaactgttttcactgtggttactcattcattcacccagaagttgggcagctttcttaaacaatgggcaaagacccgcatgcaggagttagcaagacacatgcaggcaaaaaacgcacaagctagtggggaagagagtatgagaccctccccaccacatacccagcacctggcccctgccagaggggcgatgcaaagtgggggtgaccacaggggagggggagaagcaattgggttccaacctacaggtttagttaagaaggcattagttcaggatttcacaacagattcactgtgcttggatcaatcaacacattgagagatgtcaggttcctagaggactcagcctccacacccttcatctctctctgcgggaaactttcaacacaattgatctaaatggcacagtttttgttgatgccagtttgctagttcataatcacgaacccttagatgactcagatgaaacaagaggttttttttcttcttcttctttgtagatgcacaaggaaccgcatgggcaagtatagattttctaaactatcctttccctttggggccctgggaaagcccaaaaatcagggaacaacagacactgactccctgcgtaagctgattgtaaaagccagtcctgcttctttcctgcaggactggggattttacaaacatacggacatgagagactcaaacctcgatcctggcacttcaaaatatgttagtcacgtgagcctgtggtgggtgcccccctctctcaatggggggtgctgtttacagttaacaattgatcagaacaggtaaagggtaattaaaatgtattcgcccaacaaatgggcattccttttataataatgaaaaaaacctctctgttcgtaaagagttgtctgcatcataaataagaaaggtattcataattatatcccaaaactgaaaagacaacaagtgtctcccaaggtggattgtgaaatcaactcggtgcttcaacgtacttggaaagtcagcctggtttttgttttgttttgtttttgtttttgttttgagacagagtttagctcttgttgcccaggctgtagtgcagtctcggctcactgcaacctctgcctcccgggttcaagcgattctcctgcctcagcctcccgagtagctgggattaccggtgcctgccaccacacccagctaatttttgtatttttagtagagacagggtttcctatgttggccaggctggtttcaaactcctgacctcagatgatccacccaccttggcctcccaaagtgctaggattacaggcgtgagacaccgcgcctggcccctcctgtttttgagtaggggggtttagtggctggaccttaccttctcagaagggaggaagggtggctgtgactccatggggcaagacttagggtcaggggtagcagccccaatatctctcagctccatgtggagagctgggataaggaagccacttcaccccttcctctttgcagtgcaggccccagtgagggtagcccaatggggtagcccttagcttgttaccatcccagacaactcaggatctgtggagctggcgggggctctgcctccaggggtgccagcaacaacccctgtcgtcatgggcgggacctgtgctcagactcccttacctcccttcttcactgtgtgcccctggtcaagagagtcccactcccttcacagcagccgatatttttagctctcaaaccaaagctatcctgtgtgctgctctttcatattagggaggcagcaggaagacggtctctggcactctgagagctcagttcattttctaaatcattttgcagacattaactcatcaatctctataacgcgctcatggaggtgctgaggcagccctggcagaaccctggatctcagagcaattaagtgatttgccctggctcacaggagggatgtgcaagtcagtgtcaggcgcagcctttgggaggccccgaggctctgcacaggtgcttgatgacgcaagccatgcatctggctctgcatcctcgtgcggttctccaaggcggggtaggtaccggccgtggttgacgtagggcacacatgccacacggtaaagcctcgacagccaaacacagttctgctttccctgatgccaaaaatgaggtgacgggcacaggcaataaacgacacccaggagcacccccctgacccctttgatggggtgatgccatcttcgaaagctcaccactgccggtccaatgggactgctccccgctgcaggtcctgtggaagcgcggggctggaggaaacaggccagtgggctcgtccaagttgcaagactgggcccagccgatggcagggcgatgggagagaggaggagccccaaagactctcctcctggttggcacaaggggtactaaaaaggggaatggccatcagcacaactgcggaggaagtgaagcagaggcaaccagaggggagccgagaggatgccactggctctctctccaccctcatcgggtcaccagctctttgcctaaatagaagcgtggatgctacggcaccttccaataaacacatccaaatcagctgcaaattaatttgtttcagcaatcaagagccgtgccctacatccattgcttgatgcttagcacattctccagtttgatttcttttctttttagatttttaaaaaagatgtcatatttttagagcagttttaggttcacagtaaaaccaagcagaaggaatagagcttacccagagagcccctgcccctcacgtgcagtctccccagtcatcaacacccccctggagtgggccatttgttacaactgagagcctacagtgtcactcgaagtccatagtttacattagggttcactcttgggcttgtacattctaccagtttggacaaatgcgtaacgacatgtatcaatttttatcattaatggggaaaatcagatacatacatcagatagggaatcctagagccaacccttagcataaattaaacacttcctgttcctctccccattttactaaatcaatgatgttcacatggaaagaaaccttgcaacagggactgtcagaatagatcagaacatcatccttctagagaggcatgtttcagacagcctaacctctaaggtcttccttagccccatccccactataagttaaaaaaagttaagaccagagacagaaaatgggctaatactatgttaagttttgctaaaagcaggctctaaaccaatcttaggagaattttaaaaagctggtgagtgactgattcctcagagcatctccaaaccaaatcccaacacagtttctccacgtgcctactcaccaatgtctgtttccttgtggttcttgatgtattctgccagctcaaagttgcctgctattatggccacctgcaaagtgaaaatcacattaagttaagtgtcacctgcagaacaatgatttctgcatatactattacatcattgaaggcctaacaccaaaagaagtccaatcagaacctttaaaatggcagccgcaatatcaacactcatccactcaccttgccaaccaccacactcacttctctcaaagcagttggctgttctatgatgataaggttgtcgttgctctacaacctatatgagtgggggcctctgtccagaaggcatgtggggcaaattacccatagagcagctgaggattcaaccaggcctgagtctggaaatctccccattgactatgtcctgtgtacccacggggcttgattggttccagctctgacaccccggagccctgtttatctgattagatgcatgccaatctacataactggaaagaaggggaaacctcaaaaaaagcatttaaaactcatcagatttcagttatgtgggaaaaattctacccatagatgtatgcacagccagatgagtggcaccaaaaccatcacctacaggaaattgttccaactccggccctacagatctgttgcctaaagatgcatgatctttgatatgggagagcagtcaggcaggtaaagccaagtatcctaggatggccatggagacccataaggaaggccaggaccagagaccacacgggcaaggcacacagtgcctcagaaggagagaccttgggctcagggcaatacatataacccacaaaaggagccaggcattcagatgccagcctggagaaatacacatacatctacaatgcgctgatgtcaagtcataatgtaagtggaccttatccaaacagctgggggccttatgagcagaaattgaggtttcctatggaagaagtctttccttaggactaaggcatcaactcctgcctgagtttccagccttacctactgatttcaaattggccaacctcataattatatgagccaattctttacaacaaattataaacaaatgcagactttagtgccaggagtggggtgtggctataacaaatatctataacatcttcccaacatgggcttacttcatttgtttaatttaaatcaacctttcttcttgtgtgtatgaggtgatctggtaaggtagggtgggtgatttttggttttgtgttttttcttccttacttagggcatctgtaggcctcaaaggacctttcctttaggtcatattcctcagaaagtcttcgctcttcagtttttattttttcttaaagaatatttttaaagctcaaatttgtgtaataatttgggactttatttagaattattggctgctggcagcagcaggctattctgaaatgtctcataatatacatatacacacacacacacacacacttttttttttcttttttttttggcagggtcttgttctgtcatccaggctggagtgcagtgatgtgatcttggctcactgcaatctctgcctcccaggctcaagtgattcttgtgcctcagcctcctgagtatctggaattacaggcatgtgccaccatgtctggctaattaaaaaaaaatttttttttttggtagagacagggtttcaccatgttggccaggatggtctcaaactcttggcctcaagtgatcagcctgcctcccaaagtgctgagattacaggcatgagccactgtgcctggccaaatatatacacacacgcacacacacacacacacacacacacacacatatatatatgtgtatatatatatatgtatacatttaataaatatggtgttggtgaaaaaaaccaaatatctaaaaatattatggaaatgctttggaactgggtaatgattacaggctggaagagttttgaggtgcatgctagaaatatgaatgttagaatgattctgctgagatatcagatggagatgaagaacacgttactggaaactggaggaaaagtgatgctcgttctaaagtggcaaagaacttggctcaactgtgttctagtatttttgtggaaggtagactgtgtgagcgataaaatcagatatttagctgaagagatttctaagcaaagtgctgaaggagcagctggatcctcctgactgcttatagtaaaatgcaaaaggagagaaatgaatcgaagaaggaattgttaagcaaaaaggaagcagagcttgaagatttggaagattctcagtctatccatacggcaaaaagtgaaaaagcctaaccacattgcaacaaaacgaacactgagggtatggctggaacatcacttgataatgtatgggattataaaagcaggaactctgccagtttgaatggaaggtgatggagataagacaaatgaaagaagactatcggacttaatggatttgacagaagagggtaacagagctgtctggtcacaaatgtgtgctactcttcaggaagaaggcaaaataaccctgaaaggaattcagagatcatcagatccaccccttggtttcaacagttagatggtctctgcccaaagacttacgggcaggaccacagggcagagctgtgaggtgagatggtttgtgtgtgtccccatccaaatcttatcttgaattataatccccatgatccccatgtgtcgagggagggacccggcgggaggtaactgaatcacgggggtggtttccccgtgctgttctcgtgatagtgagtgagttctcatgagatctgacggttttataagtgtctggcatttcccctgctgacactcattctctctcctgccaccctgtgaagaggtgccttatgtcatgactgtaagattcctgagggctccccagccatgcggaactgtgtatcgattaaacctcttttctttataaatcacccagtctcaggtatttcttcatagcagtgtgagaatggactaagatgtgggggaagcctcctgagtggcggcttcccttgggcatgaaggtagaaaaggtggctttagagataagcatgtctccaggccacattcagagagtcagaagctgaggtgccgtcctcccaaaagggggccatctcttcctatagcccacctccaactcagctttgggaactcgacttaggtgatgtggacccatgccctggtctgctcaggctgagccagacatgtccttctccaggtccctgatggttgtgctggctcaggatggcactaggcctccctgcccacaggcccaggcatctctcctgcactcctacagaccagcccttgccgaatgcctgaggtgatactggcggactggcggagggatgcggccccagaggtggagggcatgggctctggcctgggctgcctgggtgtaaatccagactggtactatgtgacactgggcattacgtgtaacccacaaacctaggttttctcacctgtgaaataggtttggtgtgtggatttattgagatctcacaagtaaaggtttagagcagtgcgtggcacatggccaatcaaccctaaaaaactatgctatgggccaggcgctgcggctcacacctgtaatactagcactttgggaggctgaggcaggcggatcactaggtcaagagatggagaccatcctggccaacatggtgaaatcccatctctactaaaaatacaaaaattagctgggcgtggtagcatgcacctgtagtctcagctattcgggaagctgaggcaggagaatcacttgaacctgggaggtggagactgcagtgagccaagatcgtgccactgcactccagctcggtgacacagcgagactcggtgtcaaaaaaaaaaaaaagtttgctatgattagaaaaatgatgactatgtcttcaaacactgcagactgctctttgtaaaggtaatccacccccaggtcacccagcgccccacaaaaatgcgcagtcagatacacacaagtgcacacccacatctgcactggaacacacacctaggacagctgctgaaataacacgtacgtggaccatcccctagtgattccgggattctccttccaaagaaaagccctaggagcttaagcccaggcacctccctgctggtctaaaggactcaactcacagtgcaaatgagaacaatgcaaacatttacttgtgataattgcctgactgtttctccccttgatgatttcaaggcctagaaattcctcttggcagaaagcagcctcctgcctgtcctctggcactgcccgccctatgcttggcttatcatgggttcccagtaaaagtcttctgggagaaggaagagggaactgggtcttatgtgacatctcagcattgctcagtgtcaggctggtgtcaggctcagcattgctggtgtcaggctgctggtctgggtgcatgaggaaggcagagtgtggggtctgtctctgtggctgcaggtgtgcacagcagtgaaaagaatactcacagcagagacacagccgaggctcaggtgccacacgctgctctgagtgagttcccaggagcgacctcttttgatcttaacagctctatgaagtgggcaccattatctctactcgacagagggggaaactgaggcacagagcgataaggaacgggctccacatcacagtcagcaccaaagtcaagacattcactcaagccgtttgggttcaaactcttcatctaatcaccttagcttataatatgctgtcattttcatggactatggcatttttttaaaaagttatgatataatcacaggtcaaacacctttgtaaaaaatagaagcataagaaacaacaaatgacaaattattctcgagggttatgacaagccacactcaggctgggcacccacagaatcttctatggtgaaaagtgccctgcgcaggggaaggactagtcctgtaagaacggacgctgctttgtccaggtttttcagagccctagaggcctggaggggagccagtgaagaaatgagaactctgctctctacagctcgcctgtttttcccccattaattcaactgtcctcctccttccttgtttcaaataacatttcggtaatacagacagatgcctacctgcagggtacggccataatgcaaccttgagggggaaatgttagggtttaaagaaacccagagcaggaaggagccccttacccccacaggatgtagagagacttcctgtcgcctccctctgcaagccatcgccagctttggagtacccggagaaggagcacctggtggaggttacagctcaggcaaaggtttggaggatggatgtcagacgtggtgaatgtggcagcaagacaggcaagatggatgtgtggtgggaggaaggtcagaggtcagcacagaaggcatcgactggtaagtcatgggaggaatccacatgtgaagccaagggaaccctggcttctgcggctaggaggtgacaagaaaccatggccttgggaggcatctggggacagaccatacgagggagccctgaaaaacagcaacaggcaagatgtctccatggcccggggcccggctggcactcttggacagacaggaggctgggagaattcagacgatgggcagccagttctgtgccatgccactggacagcagagcagcaggcggccacccgggcagtgtcactgcaccacactgggcatttgtatgagacgcctcactggcattctaaatcatcctaattctcacttccgtatctgctggctgggaaggaggaaggccttttatggacatttaaacaagagttatgtaacacaaagcaacagtctgtgtttctcttctgtggatctcaaaggaaagggaggggcggggcctccagggaagatgcagagggcatcctccctcgctggcctctcagccaagtgtgcggccgaggtcccagcccctgccgcctccccacctgtctccctcagagctgggatttctcgctgtgcccttgggggctgcctctcagggggctccccttagctcttgccccaagacagagctagcatcactttctggagcctttgctgtgaccttatgattgacatcctgcatttgaagtgtgatctacagttccaggcggcatcgatggctgaagttttgtgtgatgagggcaccacaggattttttttgtgggaatcacccccagttgtaagtcctcagtgccctaaactgggttttcctggaatgaagcaatcatatctgagatgggaaccttttgctggtgctgacaaagccccctgcaagagttggcactgggattaacaagtagaggaaagcagatggacaccccgccaggggccctgggggctctgcccttggcactcagagccacagggtcccctacagatgcaggaatgtcaggagggagcccacattttttttcaacagcagtcactctgcaaggcagtgcatctctccaggagacagcacggcccccctccactgatctaccagctgggggagaagggggagtttccatctattctcccaactcaagaattgacaaccatctcctccttagcacctcaagtgcttacacctaacattaagttagccggctggactcagtggctcatgcctgtaatcccagcactttgggaagctgaggtgagtggatcacctgaggtcaggagttcgagactagccttcccaacacggtgaatccccgtctttactaaaaatacaaaaattagctgtgcgtggtggctggcacctgtaatcccagctactcgggagtccgaggcaaaagaattgcttgaacccgggaggcggaggttgcagtgagctgagattgcaccactgcactccaggctgggtgacagagcaagactctgtctcaaaataaaataaagtaaataaaataaaataaaataaaataaaataaaataaaataaaataaaataaaataaaataaaatagcattatcttagcctcaagctttgaagcacatctttgaagcctataatatgacaatcacagcccactaggacttaggatcacagaaagactggggactcgatccatcacactcatcattggcaagcgtcattgggaaagacagtagaggcacccagggcttgtccacgaggggctggggtcccggggctcgaggttggttcagacccctgccacatactctgtgcatgaccactggctggaagccccgacttgtgaagccctgttgtctcttctgccacatgcattgcaacaccgcagagacttcctgtcccctctcttcttaagccattgtccagctttgcagtaccaggagaaggtgctgtgtgccagatgcaaagccccgcaaagctggtgaaaatgccacctgcacatcttcctagagccctgagctctgccaaaccccaaaccctccttctccccgaaatgccccactttgatgctgtgtaagcaggtaaggcccattccaggagcagcaccccaaattcccagcacagaccctcgacctggtgcttcctccaaacccctaatctgtattaaattaggcagcccctgctatccacccagtccttgcacccaccccatcaaggacacctgtagacttcatgggggcacttgttcctcgcttggtgttgcctgccccacaaactcagaaacaaaccactcaagtagtaagtggtgagaaggatcagactgccacaaggtgggtgcctggaaattatctgagtctcatgccaaaggacagtgctcggtgcccacagggcccgagcgtgttcaggaggtgcaggcaggctgggggctggtgagcacagcaggtaaagctacatgctcaggtcccgcaggtggcgtggactgcaatcccatgccatcacctaaaaagctgcaccctcagcctctgaggaacttaaagaccaacacgggtgacatggcttggctctatgtccccacccaaatctcatctcatagctcccataattcccactgttgtgggagggacccggtgggagatctgatgggtttttttttttttttttaatggagtctaactctgtcacccaggctggagtgcagtggtacaatctcagctcactgcaacctccacctcccaggttcaagtgattctcctgcctcagcctcctgagtagctgggattacaggtgcctgccaccacacctggctaatttttctagttttagtagagatggggtttcaccatgttaggcaggctggtctcgaactcctgacctcaagtaatctgcccacgtcagcctcccaaagtgctgggagtacaggcatgagccatcgtgcccagtcaatccgatcgttttaaaaaggggagtttctccgcacaagctctctttgcctgccgccatccatgtaagatgtgacttgcccctccttgccttccaccagtattgtgaggcctccccagccatgtagaactgtaagtccattaaacctttttcttcccagtctcaggtatgtctttatcggcagcgtgaaaatggactaatacagtggggaaatgggaggaacagcctgggtgctcttaggcatggcatggtctcaggatggtggaaggtggagtggggtggtgccaggagcaaggacagccccacagggactcagtacctggacaggcttgatggtgggaaatgagccagccagacaggcaggtgaggaggacctggggctgtctggttggtcctcgccacagttctctgaggatctgaattccactgctcctattatatcaggcaacccctttcaagacagctccctagacagctccagcactgtgtgcaaaatacctccctgggctcaagacgcccacccgcacacccttcactgaacaccacaaagtgccgcatcctataccacctagcactgaacttggcctgctgtgatgctcttcctgcttcatgtaagcctgcattctgaatgacgaaatgactctccctgagcccagtggccgtgcggatttctgccatggtctggatatttgaggccccctccgaattcatgtgttgaaatggaagccccagtgtgagggtgttaggagctggggcctttgggaggtaatgaggtcatgagggtggagccctcataaatgagattagtgcccttggaaaagaggctgcagagagagcctcaccccttccgccatgtgaggacacagcaagaagaccaccatccaggaagtgggccctcatcagacagcccatctgctggcccttgatcttgaactcacagcctctggagctataacagatccatgcctattgtttataagccaccacccagtttatgtttttttttttttttttttttttttgagacggagtttcgctcttgtcgcccaggcttgagtgcagtggcacgatctccagtcactgcagcctctgcctcctgggttcaagcgattctcctgcctcagcctcctatgtagctgggattacaggcacatgccaccatgcccggctaattttttgtatttttagtagagacagggtttcaccatgctggccaggctgatctcaaactcctgacctcaagtgatctgccggcctaggcctcccaaagtgctgggatcacaggattgcacccagctcattttatggtattttgtgatgtgacagcctgaacagacaaagacagcgcccagcctgttgcacctgtcacccaggccagccccaggctccgacaaggtgccacaaagccctgccttcctgctcagggctgggacatgggcagcacatgcgaatgctcttcacagtggtgagggcgccatggagcgggactgtcgcctttgagtgtggctctcaggtggccagggccctggagaggctgtggacttgctgcagtgcccacagtgtgacctgttccctgacgccaagaggtagagcccaggcgagggtggaggccacctctctcctcatcacttgctcaacaagctcctgggatccacagccagaactcggaggaaagccactccaccgccccgacgaagcctccttctcttgccaaaacgaaatgtgcctcccgacacagagagctatttagaggcggctctgtgatcctgacaccccctcgccataactggaaaatggcttctcggaaaggcacgagagaaaccgagcacttgggatgtccccgtctttgtttccttccagataatggtgcttcatttatttcagactcctgtggcaactcaggaagccactgatgcccaaagaccccagggcctggtaagaatgttttaattacaggcatcctccaagcacggcagggagtgggcctgggctcctggctcaccaaggtcaggggtcgccgagttcccctgcaaacttcaagggaatctctgcccatccccaggctaaaacccagaatctggagaggcagttgaggcctatgtcgttccagaacagctccctggggctttgcgaaaaccccatgcagggccagggcctttgcaaatcgatgtgtattacccagaagcccctggttgctccgggactttacatctaacttgacagggctgaccagatagagccagggctgactcaagcaatgtccacaactcctgaagtgccggctcaggggagtcgtgggccaggacccccggccagaggaagcagctggggactgggaagctattgtaggagcagttccatgctgggtgacccagtgagcctcccaggttagaggaagaccctgagcatttgagtaagacttgcctgggtctcgtctgccagtatccccagaggctggggatgaaacagcccctcagtcccacagaaggtggagcaggtccagccctcagcacccctcccatggctgagtgaaggggaccccctgggttgtggccagatttcactcaggtagcactgtgcggtggtcaggaccacaggcttggacgttggacagccccagagggagccttctagcaccgataccaaagacaacctccccccttctcaggctcctgaaactgagaataagaataaaagtatgattcttctatgactatcatgagaattaaaatagttaattagcaaataataattggcaaatgacttaaaatagcgccattcagtatcaccaaattgaatgcagagatccatatattaaggagatgatatcatggctaggtgagtttattttagaaataagaaaattgacaaatataattcatcgcattagcagataagcaggggaaatctacataatcatctttgacagttgcaggatcggattttggataaatattttatcaagacacatcggatatgacaacatagattcatgataaaacttaatagactgggtcagacatgaaggctcatgcctgtaatcccaacaatttcggaggtagaggcaggcagatcacttaaggtcaagagttcgagaccagtctggccaacatagcaaaacccatctccaccaaaaatacaaaaactagccaggcatggtggcacgaacctgtaatcccagctacttgggaggctgaggcaggagaatcgcttgaacccgggaagtggaggttgcagtgagccgggatcgtgccattgcactctgcgcaacagagtgagagtccatctcaaaaaaaaagaaaaaaaaaatcttaataaactgggaagaaaagtgaactttgcctgctagtgcagcagtgaaacagattgttgcttaagagaccaccctaaaactaagggctgcatgggtctgaggactgccactctggactccctcacgtgactgcgtttaagtggagggtcagcctggctggcacacgcaggatggcctcacatgggcctcgctgttggctggaacacatctgttttcttccatgcatcctcccatcccccagcagaccaggctggcttccttacacggtgtcctcaggacagtgctccacatagacagcatgtcaagctgccaaggagggaaacagactccgcctgtgcatgggagtggctgcacttttcttcctgccacagtttcattctgcgattttgccatgactgcagctcagacatggtcatggggatctgcaggtgttctgggtgaccttctggttgaccttgtccttttggtcctgggatcgagcagaagctccgaaggctgcacagcaacctgggattcggaccaggcctccagagctgcaccgacattggcaagttacctcccagggatgctggggttcagcaccaaggtgactgtaattacaagggaaatgctgaaccaggggttggcggtgggggatcatatatgaggaggaaaaccactttcagcgtttgaaagtttctgacctaatcaacatcaacgtcaaaccgcgacccaactgatctacctccatttagtcgttcagtttccagccaagatgttgaaacgtcagccaggggaaaaactggccacctccttggaggaggccacatccccttacccctcttagggtagaagagaccttctgggcagtattatcctctgtcctgtgaaatacgtatggcagtcaagggaataaaaacctcgaaaaacatcagcgtgtaagtttaacaaacacacaaaagaatgggaaataattctttcatgtggaccaaatgcaacctccctctcccagaaggatttgccaataaaatgtaaatttttcctttgaaatagcaatggcattgaaggacatcatttgctcccagaaatcttgatagaaaagcaacagttctttgatgtttgcagaggaatgattttcaagagtgactctggtgggaccctggggctagaaaggcgtgagcccacagggcagttagacttttctacttggcctccaggaaccctagactcacggcacagaatgagggaggctgagtctagtgagaagaggagatttctggggattacagatgttgctaggctggctttcctgtgctgtaatgatgaggagagtgatcaagctgatcataatgataactacccatgtttacccaacacgacacgcagcccagcatctaaatacagtctctaaattccaccctcacggcatgccttgaggaagtagagctgtcgtgatccttgttctgcacatcagacaacaggtttcgagagctcaaatgagtgagatttcttcattgcataaaggaaggccctgtccattcgattccaaagcctaggagaaggcaggcattacacacatggctttgtgtggctctaactacagaaagttctcttgcacagcagcccaggcacagcctccctgcttaaaaaaggcaagagggagattagcaacgagatttggttccaaagcaagaattgaacaccattttctgcaggacagtaaccaaagaaagaaatcatggctgacaacggggtacgcttgcgtatgagtttgatcaggctgccatcactaagcaccacagaccgggctgcttaagccacagacacttatcatttcactgtcctggaggctggagtctgagatcaaggcatcgcagggctaggtcctcctgaggcctgtctccttggcttgcactgggccgccttctctctgtgtcctcacaccgtggtccctctctgtgtgtctgtgtcctcatctcctcttcctatagggacactggtcatatcagattagggcccagcctagtgacctcaatttaacttaattacctcttcaaaggtcccatctccaactacagtcacattcagaggtactgaggattagggcttcaatgcaggaatttagggggacaccactcaacccagaacaacttgcttagcacaagagtacgcagaatctctttgccttcctcagggacacctagggtcccccgcaaacacccaggtcagaggtgtctgaggcctgcacaaggcttgagaatctctcccctcacgtggtctgttttcagggagcagagggtgggaagaggctaccgcacactcgattgtcacagatggacacacaggagcagaagcaatcactgcctctcccatccccatgattcggttatgaaaagtgtcacacccaccgaaaaagttgaaagaataggctgggtgtggtggctcacacctgtaatcccagcacactgagaggctgaggtggacagatgacttgaggtcaggagttcgagaccagcctggccaaagtggcaaaatcctatctctactaaaaatacaaaattagccgggcatggtggtggacacctgtaatcccagcctcttgggaggctgaggaagcaaaatcacttgaacccgggaggcagaggttgcagtgagctgagatcgcacaactgcactccagcctgggcaatagagtgagactccatctcaaaaaaaaaaaaaaagttgaaagaatagagtgatgaaaatcaatacactgccaaactggataacacaattgtttacatgttgcttggtggtgcgtgtgtgtgtgtgtgcgcgtgcatgtgcacatgctgggggcacatgtgcacataattcgatttttgctaagccatgatgatgcatccctctctaaacacctcagcatttgcagaaacgaagggggtgctcctgtaagtaatgtcacactcagaagatcggcattcacccccagacttcctccaaaatcactccacaggcacaggtctccacatgcctctttcccctaattttttgtactgttttaattcagctaaaagtacatgccacgaaacacacaggccttaagcacagagttggatgagtttttttgttgttgttgttctttttgttttgttttgtttttgagatggagtcttgctctgttgccctggcttgaacccagaaggtggaggttgcagtgagccaagatcacgccactgcactccagcctgggcaacatagtgagactccatctcaaaaaaaacaaaaaaacaaaaaaacaaaaaaacaaaaaacaaaacctgccttctcagagcagggggttagcattccatgccctagttactccacattctcacagacaacacttggcactgtccatcttcttaattttggctatttgtgtgtgtgtgaagtaggtggttttaaactttatttgccccccaacttctccttttttgcaacctcaccattgctatcattagaataaaattaattatccgttttcccagagggtggaaaaaggcagtgattccaggactcaggccaagaactggagacatcagcctcacagaagctgtgagtgcacctgcagcttctatgggccagggagtacaactcatggctattgttgtttgctcaggaacatcatctcctaccccaaaatgacaagagtgagaatggtggtagaactggtcagtggccaggcgtggtggctcacacctgtaatccctgcactttgggaggcagaggtgggaggatcacctgaggtcaggagtttgagaccagcctggccaacatggtaaaatcccgtctctactaaaaatacaaaaatcagctgggcatggtggcaggcacctgtaatcccagctacttgggaggctgaggcaggagaattgcttgaacctgggaggcagaggttgcagagagctgagattggaccactgcactccagcctgggcaacagagtgagactctgtcaaaaaaaaaaaaaaaaaaaaaaaaaaaaaaaaaaaagaaagaaagaaagaaagaaaagagaagagaagagaagtcagcttatgaaggtggtggtggtgacacttaccacgtgaccttatgcaagcagaaaatattttacttcattcaatgatgtgaaggaagtttaacaaattatataagctaaaatcatgcttatggggtatcaactacattttttaaaattggactagttgggtgttgatatggtttggctgtgttcccatccaaatctcaacttgaattgtatctcccagaattcctacatgttgtgggagggacccggggagaggtaattgaatcacgggggccggtctttcccatgctattcttgtgatagtgaataagtctcaggagatctcataggtttaccaggggtttctgcttttgcttcttcctcattttttctcttactgtcaccatgtaagaagtgccgtttgcctcctgccatgattctgaggcctccccagccgtgtggaactgtaagtccacatgctaaaccatgatgatgcatcgtgcaccacgatgatacatctctaaacacctcagcatttgcagaaatgaagggggcgctcctgcaagaaacgtcacactcagaagatcggcactcacccccagacttccttcaaaaccacttaaacctctttttgtttccagttttgggtatgtctatcagcagtgtgaaaatgaactaatacaggtgtttacacggggttttatttggtcagcttctacagaaatccaaattaacaatttcattaaagtcactatcatgtgtcacatcggggaacaatttctgagacaggaacaaaaattgaccacaaaaagatctcccgggaaaactgtcttatttccttcagttctctggacttatcaatttacagtctcagggaactgaactacagattctaagccagttcctcattcatttcctttcccctccacttctccagcaaagaaaaggaaattaaaaaaaaaaaaaaaacctaccctcccatcctctcacagcctcctggtatgtttataaataaattcaggttaggtcatgtcgtttagaaaaaaaggcattcaatttataattaatcccagtgagaaagaagaaacttattatataaagagatttgttttccttcttttccttcatttgtcctaaatgatagaccctattatgacaacttggacccttcagggaccatatggaatacccagggggctctatgtgctaaaatggatgggaggtatgagaattaaattcaacacaattaaataacataaaattgcatttcaattcctccgggaacaaaaaaaaatcaaaaggcatttactgtattaggaaaattctaaagatcattattaagttccttgtaactggcaggtaaaagttcaggagaaagaagcaaacagagaaaggagaagggagggagaccaagagggaaagaaacagcaaagaaccagggatggttttcctcaatgttgtttttaagatccttgcaaataatttaaaaaccactaaaaatataagctaaggcctcagagttcccactttgggatctgggggctaaaagagaagattctgagtttagacgttggctctaaaccctgccccagacttcatgcggaaacataccctaaaaaggcatcctctccagagacgaggagcagcaggcattaggaccctacatggtgtcattgccggatggccaggctctctgtgcttctggttcaatcagagccggtcttttcatttccatttggaaaacaacactcacgtttaaccacacaatcatctcattgttcaggtaatgctgccacacttcattagggaaagcagctggcatcagggtgttctcgttagagcagtgctgtgagtgtttattgcttttcaattaatccacttttggatttagcatatttacactggggcggcaagcagagaacagggcggcggtgggggatttctgtaaggagttgtcgggccctcaaagcaggtgcagggccccgcccagccacactgccactgcagcatcttgttacagggccctgagaaggcacaccctgctcagctgcattggacagcctgtttccggaaatcgggctctggggctcatacagagccacaggaacaagtgtgcaatggggttccgctgagacacagagtccctcccccgaccctctcggtcttcctctcaggtagaatccacctggcaccaggagagcatgagcaatacccaggcttttctggcatcccctcaaaccaggggctagaaaaaggtcatcacaccacacctcccacctgtccatgctggggccttcccgggaatacagagagaagcttaaaaacccagcctcgcacagaaaggcctttcaaaaacacaacgcccttgcaaacacacacaagaggctgagtatatgaagaggagggttgggcacggtagctcacacctgcaatcccagtgctttgggaggccaagatgggaggatcacttgaagccaggagtgtaagaccggcctgggcaaggtcttaagcaagaaccctacctctacaaaaaaaataaataaaataaaataaaataaaataaaataaaataaaataaaataaaataaaacaaaacaaaacaaagtaaaattagcccagcgtggtagcgcacacctgtaaccccagctattcaggagactgcgaagggaggatcccttgagcctaggaatttgagaatttgaggctgcagtgagctataatcgcaccactgcactccagtctgttgacaaagcgagactctgtcttaaaaaaaaaaaaaagaaagaaagaaaaaaaaaaggaagaaaattcagttgttaaagtatttaactggaaacagcaggaatcttgtaggctacaacaccattcactttggaaatgcactttcctctccacaagctgcatctcagcttcctttccctaatcttagtaatgtgatctgtgggtgaagccgacagctattggctggcaatgactttccagatgatttctgggtactgctggcttgcgggacacgttcatcctcagctcccaatatgatccctcaaaaatacggatgccttctttaaacacagacgttgggccctcggagacactttgctgccactgggaatctcatctcaaatgtgcagggctgctgttcccaaatccgccagcacatgttagcagactgtacacacacccccaaaaaaatcccctagcaactacacgctggcgcctaacattttaattctttcagttatgattcatggtgccatctgtggacagataatgagagacaataatccaagaatagctatcaggcatttgttcagcagagtttcagcatcagttgcatccaagtatgggaagggacggtgccatcccaggagtgcctaaccactcccatggctaacatgggactcagtgaatcagatcagcaggtctggccgccgagcccacccgagtgacatcatgccctcaactgtgctcaaactcctgagaataccgagagcatggctgcaaggtccaggagggagttaaaggcaacaggcataagagaattcacaggagcccaccccacaaaagggctgcctgcctcgcgggacggacgggatgatggaggggctgtggctatgagaaaggggactcccttgaggcttgcttaagcttgccaaggagaaagatgcgttgctcagtcataaaatcaaggccatgctttaaagacttctggatgacttgacttatgacactcaggcacaacatcatttttttctcattctaaacactgtgtgtgttccctgacctccatttatttcagagcgcaggcctggctgtcagcagacacagacatgggtttctggacactacaccctccaccttgttgtgctcttccccgattcacatcaccttgctcttgtttttgggagccagacatgtctagggaggcctacatattttctgcagaaaagaattagagaagaatgaagggcaattaccaccttctttcagtggtttgcccaaagccattctaaaccgggcaatgtgtctacctgtgaatcctgagggataaaggacattcttggccgtcccttgcctcttgggagagggtagagttcagataagtcgagccccatgccccgtgtaacagttcatgctgagtttaatactcacgggcactgtctgggggaaaggttgggggacatggaaatggcctagttgcagcagagtgggaggcagcatagaacagtacccctcgccaacccggctggccatcacatggccacacagtggacagaggtacagaaagctcttggcacttctgaaatgcgaggctggcagacagcagaaaagctaaatcctagcatcagtcactcatgtgtatgtgtgtgcgtgtacacacacacacagctgccccgccaccctttcacacagtagcacagcaagcttcaggaattatttccagaattctaatggagcatgattcaccggcaagaggatgatgacctaattatccacctgtgtcagttaaatggcaagaagccccctcgccctcccttcgcctggcacagcattcagcatcttcctgctgtctgaagagaggcttgcaaaatgctaatgtgactccagggtctctatcctgaaagcttgcaggtatccaagcagcctggggaaagggaagccaggagcacatggagtccaagaagaaactgaaccccagcaggctctggtgtcttaatgtacaaatgtcctcctatgataagcaaatgtatcatttctcaatctccacggtacctgcgaccttaagcaccaggtgcatgtggggagggtatggagggaggttaggaaaccattgcttttggatgctttgcttaatttttattaggacacagaaaatgaaaagtcagcatgaggagagggaaagcgaccaagagaagccactacgcagcagggcagtgagctgcttcgaaggaagacagcaagtcaggtcttggccccgatgtcagctgaacatcccagcctactccaaacatcacaggaagttaaggatgcaagaaaaaaacaaacaactcccttgaaaagtgggcaaaggacatcagcagacacttttcaaaagaagacatacatgcagctaataatcatatgaaaaaaagctcaacatcactgatcattagagaaatgaaaatcaaaaccagaataagataccatctcatgccagtcagaatggctattattaaaaagtcaaaagacaacagatgctggtgaggagaaaaaggaactcttttacaccgttggtgggagtgtaaattagttcagccattgtgaaagacagtgtggagattcttcaaagacctaaagacagaaatgccattcgactcagcaatcccattacggggtatatacacaaaggaatataaatcgttctattataaagatacatgcacacgtgttcactgcagtactattcacaatagcaatgacatggagtcatcctaaatgcccatcagtgacagactggatcaagaaaatgtggtacatatacaccatggaatactacgcagccataaaaaagaacaagatcatgtcctttgcaggggcatggatgaagctcgaggccattatccttagcaaactaatgcagaaacaggaaaccaaatacagcatgttctcatttatcagtgggaactaaatgttaagaacacatggacacatagagaaaaacaacagacacaggagcctttcaggggggtggagggtgagaggagggagaggatcgagaagaacaactaatgggcactaggtttaatacctggttgatgaaataatgtgtacaataaacccccaagacatgtgtttacctaggtaacaaacctgcccgttctgcacatatacccctgaacttaaaagtttttttttttttttttttttttttttaaataaggccaacagatgaacatctcaaggcaacccatattttaagtcattttactgtgaggaccctgacccaggaaagaaaagcaattgctataaaacaggtggcccactgatctgccatgagagccaactcaacaagagattcatctcccaaaggcagaacgcttgcagccgctccatgcggggcgggggcctagggaagaaaggtcactagactctcctaacagggctcctgcatcagctacaaggtcaggtcaagtcagacgtgtaccctctccacggagagaggccgattggtatcaattttattgatacaatttatgtcctagaatcacaaggtcacccagcacccacttgtagtttcatcatccatgccaggtatagcccaggtggctctgccagtcgaagtggaattggggaagaatgtgccaaagtctacatggatatccttattttaattgattttttatttttttgagacagagtgttgttctgtcttccagactgatggaatgcagcggagcaatctcggctcactgcaacctccacctcctgggttcaagtgattctccggcctcagcctcctgagtagctgggactacaggcgcccacaactacacctggctaattttcatatttttagtacagatgggatttcacaatgttggccagactggtcttgaactcctgacctcaagtgatctgcctgcctcagcctcccaaaatgctgggattacagggcatgacccaccatgcccagccttaattgactttttaagttgacaaataaaaatagtatacactgatggtgtacaacatgttttgaaaaacgcatacaggccaggcacagtggctcagcctgtaatcccagcactttgagaggccaaggcggatggatcacttgagcccaggagtttgagaccaggctggacagcataataagaccccatttctacaaaaaaattaaaaatgtaccgggtgtggtggtacgcacctgtggtccaagccactcaggaggctgaggtgagaggattactggatcccaggagatcgaggctgcagtgagccgtgatcaccccactatactccagcccaggcaacaacagagcaagaccctgtctcaaaaaaataaaaacaaacagaaagagaaacatgcatacaatgtgcaatggctaaatcgagctgatgaacacgcacaccgcctcacatgctgaccatctttttgtggtgagaacactcaaatttgactctctcagctattcaagtatacaatgcattgttaactgtggccacaatgttgtaccacagatctcagaacttactacttctttttttttttttaactctttttttttgagaccgagtctcactctgttgcccaggctgggatgcagtggcacgatctcggctcactgcaacctccgcctcccaggttctaagcaattctcctgcctcagcctcccgaatagctgggactaaaggcgtgtaccactacacctggctaattttgtatttttagtagagtcagagtttcaccatgttggccaggctggtctcgaactcctgacctcaggtgatccacccgccttgacctcccaaggtgctgggatcacaggcatgagccacagtgcccagctgatctcaaacttacttctcctatctcagcgaaattgtgtatcctttgaccaacaccaccccagccctctccccaacctcccagcttctggtagccactatcctactctctgcttctatgagttcaacttgttaagattctgcacataagtgagattgcatcatgcttgtgcctggcttgtggtgcttaacattatgtcctccgggctcattccatggatgtcttttaaataatcaatcaagagcaaccaacccaagcttggtaactggcagcttccaaagctgcagagacatagccatgttgggataagacctggcttctagtctcaagttcaagtttaccagctgtagcactctggccaagttacttaacatctctgagcctcagtgttttcatgtgtaaacagaggtaataacagaccctacctcatagggcattttgtcaattaaagtgagatagtgcatacagcataattatcagtactacccaatacacaagcacttaataaatagtagctactagtataatcataattattttaaaagcactctctataaatagaaatattatgtatgtatgcatgtatgcatgtatgtagagatgggatcttgctatgttgcccaggctggtctcaaactctaagctcaagccagcctcccgccttggcctcccaaagggctgggtttacaagtgtgaactgccacacccagtctattttaaaaaatgattacctatgatgaaggaagagacaagagtggaaaggagaggcggagggtggaacttctttgtgtataacttggtttatagatttgactttaaaatgcaaatattctatagaattacaaaccaaaattaaaatttaaaaagcaagtcattaaaaatcaaaaataaaattaaacatagctgctggcaaaaacaaatagagagaaattattccaaatgtctctcaagcacaatagtttaattgcatgtccctaacggggtctactccagtgacagcacgccactgcaggggagaatctgaaaccactacagcagagtattgctggtaagtgctggcagcattatgtgaagaattttttgtgcatggtagaataaaccaaaagaagagtgatgttgctcattaaaagttaaagtttttagcatagctgaaggcgatacagatgttaagatcaaggaggttaagtcaaaaccttgtcctgaatcacaacaggcaatatcaatataactcatgatgcatattacctaaaaagtaagcccccttaaacttagacgtggcccttaaacaccagtttcgactaaaagaaacaagcttccctgaaaaatggctgattccatgtctgagacaagaaatctgaaatgtctcgccataccagaaaatcaggaagctatcaatgactatgaggtcatgtccaaaagactcaggaaatggtcggaatcagcctccactgggcacagacagatatgatgaagtagctagaggcagatgaatgctcccaccaaaaagagaataaacaacaaaagacaacagtaaacatatctttcaaagcatcagggatctactgaagctacaaagaccacaggtgccaaggtttggaaagaggacagctgttgagaggtgagcagatgtgctaaagctgcttctcccctaggatcatttgtacatcccagactcaggaaaaggactgagaattggtccttgggccaagagccgattcctgctagctgtagagaaatccctggagtttttagcagtgaagtagggctcctaaggcaaaaactgcagacccgaaggggagttgtctgggctagaggaaggagtagaaaaatgaatgaggcattcggctgcttttcctttcaatatttgccgaattctgaaattgggaggagcagaaggtgaaaaagcgaagcataagaaatggagggcagggcccacccaggagagaaatgctggtaagcacacgaggctctcacttgaaagtgctgagggctacaatctagaaggaaaggagaactggagttagaatgaatcctctcaaaactacaacccagccttgactcagctcagtctctgactgcatcaaggtgacaaggcttctctctatctgcctgacagaagaaatgataatcctctctgaaagaaaataacattacctagagtctccataatttttaaatatatatgcaatgcctgacattctataaacaattactagtcattcccacagacagtaccatgtgttggaaaacaaagagaaaaaacagtcaatagaaacagacccatggatgatccagatattggagtgagcagcgaagaacttaaaaatgattagtatgatcaagaaggtaaaagtaaaactgaagaaaggagctgaaaagatggagaatttcaagaaacaattgaatgcagaagggaatcaatcgtaaactctagaccttaaaatccaacgtctacaattaaggacctcaaaggtaggcttaagatcggattacatgtaggagatggataaggaaattggaaaattggtcaataaaaaatgcacaaactgaagcacagagagaaggacaaatggaaaacagaacggacacatataagacacactgaaaggctctgacatatatgtgaatcaaatcctagaaggagagatgaaaaatagagcagaagtactacatacattaagcctaaactgacaaaacatgtaaaaccacagactcaaaaagctctataaatctcaaatgagataaacacaggaaaaaaacatagctaggcacacaaatactgaaaaccaaggacaaagaaaatttctaaagcaaccatagcaaatggccattatctacaatcacaccgacagcagtctttcaaaagaaactagataagggatgtgacaaagaaaaaagaaaataactactgatctagaacctgtacctcacaaaaatatcctattaataaggctaaataatgacatttttggaaaaatcaaagcaggcattctatcaccagcatgaattctaaaaaggacttcttttagcaaaagaaagatgatcccataaaaaaaattcagaaaggaataaaaagcaaatggaaaataagtgagcaagtaataaagaacaggaagatgtaggagtggtgagtttctaaacgtgttaccacagctaggagatgcaggggaggaagctgacctggtgacataaacaaaatacaacatcccctatactttaaacaaacaaacaaacaaacaaacaaaaaacccataagcaaagttgaaaggagataaatttgaaaaaaaaatccacacatttgtaacttacgattaatgagttaaagtacctattatattactataaatctacaacacagaaatccaaacccaaaacccaaacaggcacaatccaactgacactttttatgacagggagtcattgatggtaaaaacccatcaactgtaaggaagaagaaagaaatttgcagttgcatggtcaggagggggtgataatagatgatgggtccccactgtttccctccaatatgactgccctgatcctcagctttcctctttttgttttgttttgctttgtttttgagatggagtctttctctgttacccaggctggaatgtagtggtgtgatcttggctcaccgcaacctccgcctcctgggttccagagattctcctgcctcagcctcccaggtagctgggattacaggcatgagctactatggccagataatttttgtatctttagtagagatggagtttcaccatgttgccaggctggtctcaaactcctgacctcaagtgatccgcccgtctccacctcccaaagcactgggatcacaggcatgagccactgcgcccagctgcttgcaacattttttgagagagacaggatcccactctatcgcccaggctggagtgcagtggcgtgacgtaacctcagttcactgataactccacctcccaggctcaagcaatcctcccatctcagcctctcaagtagctgggactacaagtatgcaccaccatgcccagtttgtttttatatactttttttgtagagtcaaggtctcactatgttgccctggctgctcttgaactcctgggctcaagtgatgatcccgccttggcctcccaaggcgctgggatgacaggcatgagccgccacacctggccaagcatcaatgtcttaaccctgattagcctaattgggcagctcctcttctcttccagccagtgacatccagcctataagaatgcagaccggtgaaccactgcccagtgatggctcccccagtgcccttgtgagacactgcagtgagccccgtgtctgctcagggggaggcacgagggagcagacaggggcaggaggctggccaactacacagaaaccaataccatcacagggaaagccttgccgggccctaggtgccatcataaaacctttgctttcaaatgcacaagactcagcatccctcctgccacactccccaccaccctgcaccgttaccagagtccccaggagtccctcctgacggtacagatactgaccggcctgacctgccatattgaggacatgccccagagcaggtctctccatggacaggagctcagtccgtgcctcctgggtaagatgctgcatcccagtctcacctgggacacgctgctcctaggatctcggggccgggctcaggtgtgagagtcaaacaccaggggctctgtccaacagccagcgaaatggtggggctgaaggaaagccatgcccttgcctgatacttttttaaaaatttttatttttaagacaaagtcttgctctgtcaccctggttggagtgcagtggcacgatcctggctcaccacaacctctgcctcctgggttcaagtggttctcctgcctcagcctcccgagtagctgggattacaggcacccgtgaccatgcccggctaatttttgtatttttagtagagacagcgtttcgccatgttggccaggctggtctcaaactcctgacctcaagtgatctgcccgccttgaccccccaaagtgcagggattacaggcttgagccaccgtacccagccccttgcctgatacttgataagggttttacacttttattatctcattaggcaccacaaaaccttataagagaaatggggcttatttcagagaacagataaaggaaaagctacgcagacagcacagggtctgccactcccggaacaaggcaaggctggagctgctaactttgtattggaagcgttcaccaggaccctcccttcccatcaccatccgggctcacaggggggcagattgagcacccacttgcccagcagagatgcgcactctaagcttccctccaccaagcggtcaggaaatagacaaagccagatacaactctccatggcggtcgacactgcagaggggagtatgtgtgggggtttcacagtgggccactatttatatctgcatgaatcagcagccttaagctgtttctgaaagcttaagcagttcctgtatgtttaagaaagcaatggttaaatatatgccctatttcatcagcaacgttatggaataaatatttcaacgataccctgctatgttgactctgtgctaagaaaaaaacaagcatttttattaaagatgacccgccaaagtgaagaaagccctgttaattcttgcagattaggtgcccaataggagtaggtatcacctggaaaccaagctgtgtaataaggaaacagcatgttcacagaacatgtctcttccagtgcctggtgccccaccccatgtgtccataatcaacaccaagcagacatgcacctgtgcaaaagtcagatacttaaaaactggtagaaaaaacatatgaatcaaatcattcctatggtagagcttcatgcttgtgttaggttaaaatataaaagcaaatccactacaaatgactggtaggagcaccctagtgggaagaaaagccggatttgcacagcgtgcctactggatgttacatgaacatgaacttgagaggtgcttgacctcccctgcttgccttgccgtgtgcagacagcactaacttcttattgtccaggatgtgtaaagagattattctcatggtctgcggtgctaacatcctataaacctgccacaaatacaaaattagcaatactgagctgttgctcctaggagaaacacagtgttaggttcctgagagcctctggtcacaccttcatcaacccatcaatacataacctagttttatgtgtactcttgattaaggacaccttatttatacatattgttgactcattaacattgtatcggctgggtgtggtggctcccatctgtaatccaccaatttgaaaggttgaggcaggtggattgcttgaacccaggagtttgagaccagcctgggcaacatggtgaagccccctctctaccaaaagcacaaaaattagctgggtgtggtggtatgtgtctgtagtaacagcactttgggaggccaaggctggcagatcccttgagctcaggagttcgagaccagcctgggcaacagagtgagactccatctctacaaaataccaaacaaaaattagctgaacatggtgatacgtgcctgtagtcccagctatttgggaggctgaggcgggaggatcacttgagctcaggaggcaggggtggaaaggacatgcttggctcagtaagccaagatggcgccaccgcactctggcctgggtgacagagcaagaccctgtttccaaaacaaaacaaccaaaacaaaaatggtgcattcacggccaatggcactatgactcagacatgaatgaagtttctctaaagtgtgttttcttcatgagcacaccacagccttctcgcacttgggaaccccagacagcactgcagcactacgataggggccattccatacagcaaaaccaccaacaaacggcacacaatttcaaaaaccatagcactaaagagatggcaaaaaggacacttgtttagggtacaagagctgagaccagaaggcagagcgtggccccattcagcctcagctgggcacctgcgggctggatgactcagactctccactgctctgtgtggctgtgaataactctgaaggcgcatgagcttttatatttcagtgttacaaataaattttagtgagtaggcaaaatcacaaatatggaatctgtggataaggaggacgaactgtgcagaagtgtgaggcgtccatggtctgacccactcgagctggaggaggcatctgatccttacttaccaataaccacttgtctctcttctgcctcctgctgggtccctttccacctgcttaaaacaggcaaaagccggtgatcagaatctctgccgcacgacgtggcagggaaaaaaagaataccaggcaggcacacatcatgtgcttgccaaggcatctcaatatgttaatttctttgttttaaaaaaataagggcctagagtaataagaagtagactccaatgcaacacacggagacaaaagattctttgtagctattttataaacaataatacttcccatagtgttaaaataaataagagtccctgaacgctgactctgaattccatttaaatattcatgaagattctgaactcgatctccagaaaagatttcacaataaaatattccgtttatcccatctctcttgctatgctcccagggtcatttcactgcctggtgtgacggacttgagagccgttggaagcacaggagactcagcttgttctatgtgaccagcgaatctaggccaggttgggactgatggggcccgacatggggagagggcaggcgagtcaacacaaggaaaagaaccccagagagcagccatctccacaagcagtgagttccccatctctgcaggggttcaagcaaaggcaggcaagatcttaaggagatggaaattcccattaagacacaggcagggtcctggtgaccttcaaggccagtgacagttcattttatgcatcaccttgactgagttccagggtcctcagagtaaactgttatttctgggtctatttgggaggctgttcctggatatatctgggagaatgttcctggatcagcatttgaatcggtaaacccagaaaagcagatgccctccccaaagtgggtgggccccatccaatccgttgagggtctgaatagaacaaagggaagaggaagggggcattagctctccccagctgactgctggagctgaacacaaatcgttttctgcccttgtcctggcatttacaccaccagctttcccaggtctttggtttgcagatggcagattgtgggacttctcagcctccgtaatcacatgcgccaattccttataataaatctctcctcattctctttctatatatatgtatatatttatatatgtacacatatatacatgtatcttattggttccatttttctagagaaccctggctaatacaaggcctgtcgacaccacaaactgcatgccctgaaacccagagggaaaagggcattgtcgccgatacctgttcccgtcgatggagaccccagccatggagctgccccctccaccatgcattccaaaggtgtctagaagggaaagaaaggcttgtatgcttgaagggggaaaactggaaggcagagatctgagacagctggtcaacttgctacaaagccttattcagggcagaacaggctcttgtggcgcacctggcatggatcaagggctgcccaggacagtcctaagatgcattttttgacatgagaaacagagcatggttgccagaacaacctcacccccagaagatgcagcaaagggtttactgcttgcttttatgtggaacacgagatgggatcacagggcctcagaatggaggaaaagcctgtggtaacagaaaaaggcatttgtttcaaagcagatccctgggggggaagaggaagactgggtgggggcataggaggtggtcccctggaggaagaaccagcccctccaatgggatccatggggcagaattaggaccaagggagaaaaacttgcaagccggccaagatatgagcactgataaaggtgcctagggctggaagttaggagcccacctacgaccgtgaacccggacaggtggtagagctgccttcaaacccccacaccaaaagcctacaccagaggagagaggcaggaagatgcacacactgaagaacggtagggggtgacctgaaagtgactccccatctctcctgggagggtggggctggcagagtcaggaagcagacaaatggtaatgcagaccctgggggagtgcagacctgtggaggtgcacacgtgtcttgtggagagagaagctgggagggcactactttttcagcaaaagaagcaacaccacccacaggacagggagaacaatgcgcccaagggctcgtcacttccttactctctagtgtgacttccagaacttgtacctgaggttgccatctgttagtggtgtgtgtatcataaggaagcctctgcttttgcagaaatatctgaggggtagaatggagagacaggatgccgaggtttaaatgtggctctgccccgaggcacttactactcaacctcggtctgggcaatttcctcatctgtaaaatgggacgtgcctcaaagagctgctgggaagattcagtgacttgcacgtgagtgtcagttccctgttgctgctgtaacaaatgatgcaatgtgaatgtatgctcttactgttctggaggtcagaatcctgaaataaaggtgtgctgtcagcagggcagcattcctcctggaggcagtaaggaagaatccatttcctcccctctgccaggttctagaggccatctgcatttttgggctcatggctcctcctccatcttcaagaccagcatggcagcatcttcaaatctctctccgacctccgtgcctgttgtcacatgactgctgactctgaccctctgccttcctcttataaggacccttgtgataacatgggcctgactcagatagtccaaaactatctccccaactcaagatctcaaacttcatcacatctgcaaagtcccttttgccatgtaaagtaacatgtgcacaggtttgggggattaggatgcagacatgtttggggggacattcttttagcaactgcaatattgaaagctgtcagatcctgggtgactacagaaacgtgagctttaagtgccacagaccgtcactgaaatgacagtggtgagtaggatgctgatgaggatacacatctggtgtgagcaagccctgcagaaagccagagagtaaacaccttcagctttgaggaccacacggtctctgtcacagctcctcaactctgccctcctagcacagcagcaaacacaggtaacatttcaatgaacagacatgactatgctccagaaaatttttatttacaaagataaggctacgggccaagtgcaggacctactgtgtaaacctcaatgcagaatattttcttggttccaatcattcaatctctccctggatgaggatcagaaagtcctgccttctgcttccctgtggaaggaagcatgtccttcccacaccacagacgtcatgctctgccggtgctctgctccctctgcccagagaaccacaatgtctccttttgtctggatcctgggacacagaagaaactggggcaaattgatagtcaacctttagacgcagttaccagatggcttgaagccactgggaatgtggggatgtttgttatgaggcataactgggtccaagctgactgatgcaaatacaaagtgttagttattaatattgtatttattgttttaatgctattccagcaccttctctgttatctcacctggccaatgtgagctgctgaacctaagccactctcaagtcactgccacatctgggtagaggtcattggtctcagaggttgatcttgcaaacataaatgccttttctcttgtttttatttctttgtcttttttttttctttttttttttgagacaatgtctcactcagtttcccaggctggaggctggagtgtagtggcacaatcatggctcactgctgcctcaatctcccaggctcaagcaatcctcctgcctcaccctcccatgcagctgagactacagacatgccccaccacacccagcggtttttttttttttagagatggggtctcactattttgcctggggtagtctggggctcctaggctcatgcaatcctcctgcctcagcctccaaaagtgctgggactacaggcatgagttaccatgcccacccacaaatgcattttctgggtacggctacagaagccatcaatggataaatggatgcacaaaattcagccatgaaagggaatgaagccccaacacacgctaacacatggatgagacttgaccacaccatgctcagtgaaagcagccagacacacacagccacatgttacatgattccattcacatgacatgtccagaataggcaaatccatagtgacagaaagtagactcgtggtgccaggggctgcagggagggaggttaaggggaggctagtgatagggtttctttttgaggtgatgaaaatgttctaaaattgactatggtgatagttgcacaactgtgaatataccagaaacccctggactatacacgttagacgggtaaattgtatgatctgtgaattacatctcaataaagcagtcttttaaaagaatagcacaaagcactgggaaaccagcaccagagatgtctgtctacccctccgaacagccctcagaaggtggcagcgctgggacacccttgaccacaagtcagagctgctggcgtggccacggcaagtcaggaaagggaaaccgaagaggctatagaatcacccgtccttgtgttctccttcctggtggcggcactgtccaccggtcaccagggccagcccttcgtaggtcatctctaagccctcacccgcccctctgaaaggggcaagagaaggtgtctggatgccaaggacacagctataattagagaccacttagtggcacacagggcaacagcaaggtgctggcgccaagcgtctatcacagcaatgaggtctcacatctagaaagccactgcctgctgctgaagggccaatctcttctgagcagataccctctcaacgacgcttattatttttccaaagtgaaaatcatactaatgttttttataaagaaagaaaaacatcatccatcttcaagcctgtagaaatcctagcaattcgaaattagcataacaaatatttttttaagaaacactgaaagagcctctacgtgcagtatttattaccaatttccataagcccactctaaacttcttagaattaccataatctctatgatacggtatcttccatcggaaatgagtggaaatgtctttttcaagctgaaactgtgatgttctgggaagaaaagaaaacattttgtagacatctggttctggacaaaagtgttgcttctgccttagccatggaaatccaccccttggggaaatctgaacagccgaaacaaagttccgtggaggaaacaaaggcagtgtctctgataacagccacgggaaatattaatttccagatgcactcatttttatcttaaaatcttgtcctatataaagcaagccctcatcttagacactccgggagctagaaggaataaggggtcttcagaccccctccgcagcagaagcagcaggactctgctgggtccgcgcacgtgcggccccgctaagggaagcagatgcatggaaactgtccagaccagaggcagatccatgcccctaagacttcagaccaattcccaggaaactacctctgtttacaaagattaaagccaatttccaagtcaggcatctgggccacaccttcccattgtgtgagtagagatccaccctcaagcattcaatcttctgcacacactgaccaaagcaaatgccagggtaccttagaagtggccaggcctcagagaccccatgtggggaccacctggcggggcaggggctctcctaactacaccccctgcctaggctcatgccttccatacaatattgtcctggtggttgccacagaaaacagaaactattgaaaagcacagcataccacttcacgtgaattagcatggctactacatagaaaaaaaaaggaaaaagaaaattacaagtgctggtgagaatgtggagagactggaactcttgcacactgtggctgggaatgtaaaatgatgcagctcctatggaaaacagtacagccgttcctggaaaaatcagaaatagaattcctatatgacccagtaatttcacttctgggtctatacccaaaagaattcaacccagagactccaacaggtatttgcacactcatgtccacagcagcatgattcacactagccagaaggcgggagcagctcagtgtccaccggcagataaatggatgaacaaagtgtggtgcatccatgcaggtggaatattattcggccatgaaaaagcaacgagattctgacacaggctacaacatggaggaaccttgaggacactgtactgagtgaaataaaccagtcacaaaaagatgaatactgtaggattaaacttaaatgagctccctaaagttctgagattcatagagatggaaagtagaatgatagttaccagaggctgggggaggagggaacaaagagttggtgtttaatggggacagagtttcagtttgggaaaatgacaaaattctggtagtcatggctacaccaccccatgaatgcacttaatgccactgaagggcatgctgagaaatgatcaaaattgataaattttaggttatgtgtatttgactacagttgagaaaaatatgaatttctaaattctcttgaaaaccaggaagatctgacaacaatgggtatatatgtatttattgtaattttttaaaaaagcaacaacaggctgggtgtggtggctcatgcctgtaatcccagcactttgggaggccgaggcggatggatcacatgaggtcaggagttcaagaccagcctggccaacatggcgaaatcctgtctctactaaaaatacaaaagttagctgggcatggtggcgcacacctataatcccagctactcgggaggctgaggcaggagaattggttgcagtgagctgagattgcaccactgccctccagcctaggtgagagagcaagactgtgtctcaaaaaaaaaaaaaaacaaaaaacaaacaaacaaacaaacaaaacaacaacagctgggcgcagtggctcatgcctattatcccagtgctttgggaggtcaaagtgggagcataacttggccccgggagtttgagaccagcctgggcaacatggcaaaactcatgtctacaaaatatcaaaagaattagtggtgtgtggtggcacatgcctgtagtcccagccactccataggcagaggcgggaggatcacttaagcctgggagttggagggtgcagtgaaccatgagtgtaccactgcactccagcctgggcaacagagcgggactgtgtctcaacaacaacaccaccaaaaaaaaaaaaaaaaaacagcagcaacaacagtgcccactgcacattaaaaccaggtagtcacttcctgccgcacactcaggttcctcaccccaggtaatggaggcccgtgcagccggccggcctccctcctgcttctcaggccgcctctgcttcctaaacagcccagccccgcccagggtgcagcctcaaacacaggggctctgcctgggaagcagtccttggctgtccccaccctgctacagggtaagctccttggctttccgaggccagatgagatgatgctccccaggaaggccactgggtctcagactaagtcacccccagatagcctctcctggcattctttgcaattgtcagaccaaattccatcaaatcaaagccaccatcaattaaggaggctccttattttatgtcccaatgataagagaaaatgctgctgctgaatatttcaaatactattgattatgatatagaagaggcgaatgggaaccccttaggctgacatgccacgtgtgggtaaatcacgagtggcgtgattttcctcccagagaccagtgtggccgttcaaagaggaggacctccttgctggggaatgtcctgtccccaggttttcaataaatgggagttgaactgcctgcattttgccggggaccgcgatgcaaaccaaagcgacgcagcagccgtgtggaagcattcacggagagaagggacggggcaggtctggagctagccgccctgcttcctctctccacgggtaaacggccgtgcctatgacaggagccctccttacctgcggtttcagttacctgcagtccaatgcaatccgaaaatatgaaacaaaaaaaaattccagaaataaacaattcacctgttttcaattgtgtgccattctgggcaatgtgatgaaatcttgcctcctgttgctccgtcctgcccaggatgtgaatcatccctttgtccagcgtgtccgtgctgtctaggccacccacccatttgtcactcaggagctctctcagttctcagatgaaaaacacagcccatacatgtaggggtctgtactagcctccatttctggcatccacccaggtcctgaaacacagcccacacaggtaagaggggtctgctacagtctcattttgcagattgaagaaccgagtcctcagtttgtaattagcccctattacgtggttagccaggagtgaaagggagagtgacagccaagcagacgggttcaaggacacctctgaaccacctggaatccatctcaggaggtcactccccctgggtcatgctgaactttccaacagcctaaaacctaaaaccacaaccgagtctattctggcctggacatgaggtcttttctgaaactgggatgctaacctgttatttatttatttaatcagcaaacacatctaccatgtgccgggccccgagtgggacagctgccttgaatgaagacatgaaaaaaacagactctgtcctaactagacactttccaagatctgaaaggcctactccaagagacagcaacttgggaatgttttaaaactccatgttctgaaaagcatagcgactctttgccctgagttcctcgtcatgtgagcgggcctcttacaccgcccccgcaaaggtgaaccattccaggttaagcagggatttggacgtgcccatcatgaacagccttgggttcacacccgccaaggaccatctctttcccctacctgtccctgctgcaccggctgaagtgagcaccattcctggaggcctgcggctgaggtctcacacggattgaaatcaatttggccacattaatgtctcagctgactgagatttctctttctcaagtaaacaccattccttaaatgccagctctgtggagcttattctcaaaatgttcagaaaaaggaaaaacccatgaagaagaatcatagcactaaaaccaatgcgagagttttcagatacctttaaagcaacaggcgaggccaggcgcggtggctcacgcctgtaatcccagcactttgggaggcctaggcaggcagttcacctgaggtcaggagtttgagaccagcctggccaacatggtgaaaacccatctctactaaaaatataaaaattagccaggcatggtggcacgtgcctgtagtcccagctactggggaggctgaggcaggagaatcacttgaacccaggaggtggaggttgcagtgagccgagatcaccccactgtactccagcctgggtgacagagtgaaactctgtcttaaaaaaataaaaaagagagaattatataaaaaagtaaaactaaaataaggcaacaggcaaaagaagcaagaccatgtgtttgtgtgtttgtctttgctatttatttctctatcttgttgacaatcattttggtctctgaagatcatgttagcaaccaaaagccagagctgaaacagttctccactaacgaacaggttcatagagagctggtgcaggccgggtgggttcaggcctcctcgcctcccggactccagcccatgtgcaccctcagggttcccaacagccctccctaaagaacagccagagactgtgagcaggaaaacacctccaatgaagggtaacgcacactggtacccactgtaagtcctcaaggtgattcagccagcactgggtttccagttccaagtaaccttcatttctccttggtactgactcttccaccttcctttccctccctgagatgtcttgattggcctgaccttttttgaaatgtcactgttagctgtcgcttttaagttggaagaccgagatttgtagcatcagtcacatacttctgccctgacaaaccccagtcctctgcgtggagtcagaacatgtcacttaccagccctgtacaagctaagacgctgtgcagggacctctgggttcctcaggatcgatagagcctgtgtctagaagagtttaagagtcaccaaacactagatgcacagatgctctcaaagctcaaaggagatggaagaaaacatcccttggggagaacaagtgacgggagcacagaaatcttttgaaactccccaagtcatgtggtaacagggacgtgtccaaaacaaaagccccaaatgccttcagtgatcactgctgcctgcctgatggaggctccccaggacctcgcttccctgagagcccggtgaggcccctcctatgtgaccttcggatgatggacaagtgacatcgtcagccccctggggtctcccagatcctacaacttcctgaggacatttaccttcatcaattggtggccaatgcacctggagtacccagagggcctggccttggcaagtgtgcaaaagatgggggtggccaccattggatcatgtgcattctgctatcaaagatcacggtcacagtggctactcccatcttttgagtactttatagtgtgtgtgcgtgcatcttttttttttttcttgaggggcaatagaacattttttaaaaggcaaagcttggagaaaaaaggtctaggtcaagtcctggtgttgtccctgtttactcaggaaccgcttattgttgaggaacacaaatccactcagatgggctcagtcccagaggcagaatctcacaaaaacctagtgcagggtgtgtgacctctcagaagccagagggcctttggggcctctctcttcatttgcatgtgtgtgtggatgcctgtgtgcatgcctgtgtgtgtgtgtgcatgtgtgagcgtgatctatcttattctctccagttctatatcaccttctcactttatttttttctggcatgtccttctccagcttctgcctccctaggagcagagggctcttcataattacagcaggaatgagtctctgccccaatcccagtttccccaaggacaaatccgattggctcaaaattagccaattggctagggacagagtggggtgaaggtcggaacggaacccagagagggttttcaggtgggaccagcatcactgtatgtgtgggtgtggtggaggggggtgtcctgggcacaactttaacccctttgagcctagaggagatgtgctgaggataaaataacacagaaggagcaaacgaaggtagaaccacttcatgaatgtgatccacttagttaatactctggaatattgttgaatacaggattccctccccaacaaggaaaggcatgttcctgaaaacttacatgcagctctactcaagggattactgaaacaaaagacgggaggcacagaggctatcaggggacttataaaaatacatatatgtgtcattttgctcactaagatttagccaaagaaacagtatttactcacagccacctgtacgggtcaatcctgaggaatgtgctgagcacaggcagtccctgccctttggaaacgcggcttctagtcgaggagatgataaagagcccagaaggcaatgggcagccagccaaggacagggagagggaagcccaggagctgaggaggaggaggagagttccaggcagaggaacagcatatgcaaaatgccagaggtcagagtcaggctagtggactccagttccacacacctagagcatggaatgcagtgagcacggcagagaagggaggtgacgtgataaccgccacactcagagggcccttcttagcggggcagctgcagggagtgacacgaccccatgtgtaatctagaaaggtgaggagagggtctgggccaccagcagtgggagagaagctggtggctaatccaggagagacactagggcgccggaactatgggtggcagcagggacagagggaggcagacaggctggaaagaccttccaaagggagatgacagaccctaagggaacccggggtgactttctttctcatgaataagatgatgaggaccaggctgttctttctgactttccctccggggctttgggttttgctgggagcttctcaagatctcgtgcacttacgtttaaaaagaggatagctccaacatgttgggaggccaaggcgggcagatcacctgaggtcaggagtttgagaccagcctgaccaacatggtgaaaccccatctctattaaaaatacaaaaataattagctgggtgtggtggtacgtgcctgtagtcccagctactcgggaggctgaggaaggagaatcacttgaacctgggtggcggaggttgcagtgagccgagattgtgccattgcactccagcctgggcaacagagtgagactgtctcaataaaaataatagtaaaataaaacaaataataatttccaaaaaagaggctagcaaggtgctagcaaggtgctccatgtctggggcagcctgctcaccaaggcctctcctgagcttcgttctccatccaacagctcaacaactttgggatttgctgacctgggccctcctggtccaccctggtcctacagaacttctcacacctcattcccttccccatgatggaccaagaaaggccccgtcctacccgcagccctccccgctgcgtggctcctctctttagaggtaggcagaacaacggcctagaagagatcaagtcccaatccctggagcccataaataagtgaactttgtcttcatagatgtcatgaagttaacgatcttcagatgcagagactatcctggatcatccaggtgggccctaaatgtatcccaagtgtccttctaagagggtgatttgacgcagaagagaaggtaatgtgaccacaggggttgagctggggtgggggtccagagattggtgtgatgctgccacaagccaaggagcaccaagactgcccatcaccacccagagctggaggagatgaagaatggtttttccccagggcttccagaaggaaggcagccccacccacaccttgatttcagacttctgaacccctcaactggaagagaatcaatttccttccttccttccttccttccttccttacttccttccttcctgccttcctccttcccttcctccctccctcccttcttctctctctctctctctctttctctcttttgagacagagtctcgctgtgtcaccaggctggagtgcagtggcgcgatctcggcttactgcaacctctgcctcctgggttcaagcgattctcctgccttagcctcctgagtagctgggattacaggcacatgccaccacgcccagctaattagctaatttttgtatttttagtagagaccaggtttcaccatgctggccaggctggtcttgaactcttaacctcgtgatccacccaccttggcctcccaaagaatttcttctgtttctacccacccaggcagtggtcacttatcacagcaggcccaggacacaaaggcatctctcccattacccagtgcccctcctcctctgataattccccccagaaccgactcaatttttctcagaggataaattataactgccataaaccattgtcaaaaggggtgacagcaacaccctgacgagagggtgaacattggttgctggagggggcttgaagcacagcaatgcagtgataactaaaaagatttacagcctatgtggggcattaaaacttcatggagggtgcaagaaaaaaggaaaaaatggctgaaaaagcaccagcttaaatgaacaagcaccacacaggggtcatgggcacttccttcctttagtcataaaatatctgctgagctcccaagtgtgctatgtggcagggagatgatgaccacgggactggcctctgcccttctgaaggattctttctggtgggagacaaagatagagatttatgggtttgaatcccaggaggcagaggggctgatggaaaacaagtttggtgtctgatagtccccaatttcaattcttcctcataagcttgtcggtaaaattggttcataatatttaaacatgcagaacattcaaggaccatgtcacaccaataaagtatctggcccctatgtgtatacagtggatactcaatacacgtagtcctctctcccctcccctgagttctatctattcatgaactagacagatagctaactccacacactgcacaaaaatggaggctgacacacttagacacacgatgcctcccagaactacatctgaaggatgacagcaggccgtgtgttgaaagcaaaatattgcagaactacagataacagaagcattacggtaaactgagaaaactacttaatactcctgacctgaaacatatctcctaaacttgctgttggggtcgctatggactaaattgtgtgtcccctcccaactctcccaaattcatatgtcagagctctaatccccaaggggatggcatttggattgggaccttttaggggtgtttaggtttaggtgaggtcatgagggtggggccccacgataggattcgtgtccttataagaagaggcaccagagagccagctcactctttctttgccacatgagggcacagggagaaggaaatcagcccccatgagaaatggaatcagccacaaccttgctcggacttccagcctccagaactgtgagtgataaatgtctgttgtgtaacacctcccagcctacagcactttgctatagcagcctgtctttgtctgttttgtgttataacaataatataatatataataataataatataataatactggagactgggtcatttcaaaagaaaagagggctgtgtgtggtgactcattcctgtaatcccagctatttgaggggccaaggtggatggatcacgaggtcaggagtttgagacctggccaacatagtgaaaccccatctctactaaaaatacaaaattagccgggtgtggtggtgggagcctgtaatcccagctactcaggaggctgaggcaggagaattgtgtgaacccaggaggcggaggttgcggtgaactgagatcacaccactgcacttcagcctgggcgacagtgtgagactctgtctcgaaaaaaaaggaaaaggaaagaaaagaggtttatttagctcaaggttctgtggtgtgggaagttcaagggcatcgccttggcttctggtgagggtttctgtgctgcaacacaacatggtagagaaggtcaaaggggaagtagacacatgcaaggaggaaccacacctgaggggtgtcctggctttataacaagccattcttatgggaacaaacccattcccatgaggactaatcccatctagagagtgaaatctcactcactactagagaacaccaccaagctattcatgagggatctgccccagaacccaaacaccttccactaggtcccacctcccaacacccccacattgaggaatcaaatttcaacatgagatttggtggggacaagcgagccatatccaaaccatagcacagacctagcagactagcagagtgtcatttccacttcacttctaacagatgaacttgaggatttacattcagggacagatacttcttcaggatagaaacagtggattataagtatctcaccaagcatcagttgcactctgccctcaccttttgcatttcacaagcccttcctccttaactctgcaccaagctgtaccgggttaacactgccactcagtggccagctcaagaaattacatggagccataagaccagacaggccctttgcctgttcacttacatttgttactgagggttctgggtctggtgctgggtgccaggagaataaagatagatgggaaagtgcatccctctcaaagcactttaaagtttagcttgggagacttatgcatgaaccattcattgtaatacaatacagaaaaggtacccagcaagtactgtgggaatcaaaataaaagcttcctgcagaggaagcacttcggctctgaggggtgggaaggagttcacctggcaaaggtggtggcgatggagcaagcagtctcacctggctggagagacatcacatcattgagaagatggtgctcagtcaccgacatgttcaaaggggtctgtctgtgtctggaggagattatgtcccctgttggaggtggctcagcagcagagagggtggctaaggcacttcttagataaactcaacaaagaaagtgtggccgtgctagggagggcacctatggagccctgcccatgaaactggctaggactacaacccactctagtgtccttaggtggaaactcaattggatgcccaggcttgaagcaccttgagaactagggctctggccaggctgctaagcaggccaaacccaggaggaaccaggagcttttcccatgcaaacagagatggcaatgggtccagatttagggcacagcaaactcatggggtgagcaggtggcaatacccctgggcggcagggacaggggctgaggaggcaggagaagagcctgggccagaaggatggcaagtcctgagtgctgtggagcactgaccctgaaatgcagtcttgtttgcaacacccagtgccagatcaggagacggagaagaggtaatattaaagattttctctaaacaaatgaaatttaacttttacagcaacaatgtcctgtctggatggatgctttgttctacatggggtatgagctgctcccctcccacccaatcccttcctcaccacagggccaaccacatcccacgccacagtgctttttcaggtgcttgctgcctatttgtaaatagcaaacatctgatcatccgtcttgatttccttctgtttaaatattacttgttgacttcctgccagggaagatgagagtttcactcatttatcacacagcccaagacagccacaggcccacttggttcaatcatggttcctgtgtttatgctattatggctagctacatcttgtccacagcaaggtaggcagtcgactgcaattctatttccctcgagtatataacagctacgttttgaaatctgcctttctatttacatgtaacgaatttatcaccaagttctgacagaggtgtaaattgcagagcgcaggtctattcctgtaaggtggaaacacatctggcaatcactgttgcctgggtttctgagtcaccctctcccagagccatccaccctcctgtgcccacctaggccgaagctccacactcatcccaggcccggcccggcctctgcccggtgccagggccctccccggagtccaggtcttcctgtcccctggctcactccctctctgggtgaagctcctctccagcagcttcctgagaaagcagcataggaggggccgattcgagaacacgtgcatctgaaacacctctgggaccgtctcactgatttgctagaacactggtttgaaaggattttcccactgcgcttcccatatggctgctgagaggtcagaccccagatcctctatgcgcaacttgatttttctctcttgaaacttttaagattgcgtttctgtttctattccctgagttctgagcttttaggacctccatcctgcctgggggtgtcttctcacaccagggccctttcaactgggaatcacatccatctgctcagtggctttgtcttggatgatctctttgtttatttctccctcattattcagatgctgaacctacaagatgactcctccaattctacctgattccagggctctcttccgcctccttgtgttcatctccaacattactgctatgccatttttttgcaatcattattgatcttcaagagtttctcaaatgctccctgtttcacagatgctattatattctcttactgcactgaggatattaggtacagtatctcctttggaaattcccttctgttccccaaattgtcttggtttctgcccggactatttagttctgcttgtttcatatctgcctttgagatgacagctttcctttaatgacaggtgattatcagctgcccatctccatcttctacttgaggcacttatgcaggggatggaaattgtgtatgggcggctcttgtcaaaagaaggacttccctcggggtgctttgctggggagatgaaccataagatccttggaggaagcattctagtcagagtccacagcagtgcaaaggccctggggtgagcatgtgtttcctgtgcttgattaaaagcaaaagtggaggcctgggaggcttgagcagagggaggaggtgaaggcagaaggctggtgagatcagcaaggcccccaccagcctggtcgtggttcctccaaggtgctgttatcagccacacctacggcctcatgtggaagggccaggcctccaatacgctgagctccgacggcttccagcccttcctgctgccatcagggatggttttctccagactgccacctcaccacaaccacttcttcatttcacacaacggagcccagggttgtgtgcctgccaggccttcagcatcactaagctcatggagagccttgacccgcaggtaccttgcaggccccagcctgagtgcatcagggcatgtgggcagggttgacctcaggtggctttgcttagagagacaacagaatgactttagactcctgagacactaggttaccaccaaagctgcaggtgcctggggatgcagcacccctgagtgggaggttatgggggaagagctcgagggctcacccttccagcgcacaaggaatggctctcctaattattggatctacagcccttggtgggaatgaacgtgacctcaagtcctctctttcacagcctccctctccactaaccaaaccttcccagttcaacctccctctccactaaccaacccttcccaggctctacctccctctccactaaccaacccttcccaggctcgccctccctctccactaaccaccccttcccagactcaacctccctctccgctaaccaacccttctcaggctcaacctctctctccactaaccaacccttcccagacacaacctgcctctccgctaactaacccttcccaggctcaacctccctctccactaaccaacccttcccaggctcaacctccctctccgctaaccaactcttccccaagctcaacctccctctccgctaaccaaccctttccaggctcaacctccctctccactaaacaacgcttcccaggctcaacctctctctccactaaccaacacttcccaggatcagcctccctctccactaaccaacacttcccaggatcagcctccctctctactaaccaacccttccccaggttcaccctccctctccactaaccaacccttcccaggctcaacctccctctccactaaccaactcttccccagcatcagcctccctgtccactaaccaacccttccccaggctcaccatccctctccactaaccaactcttccccagggtcagccttcctctccactaaccaacacttcccaggatcagcctccctctccactaaccaacccttccccaggctcaccctccctctctgctaaccaactcttccccagggtcaacctccctctccactaaccaacccttcccagactcaccctccctctccactaaccaacccttccctaggctcaacctccctctccactaaccaacccttcccaggctcaacctctctctccactaaccaacccttcccagactcaccctccctctccactaaccaacccttcccaggctcatcctccctctccactaactaacccttcccaggctcaacctccctctccactaaccaactcttccccaggctcaccctccctctccactaaccaactcttccccaggctcaccctccctctccactaaccaacccttcccaggctcaacctccctctccgctaaccaacccttcccaggctcaacctccctctgcactaaccaacccttctcaattaaccaactgacttggaaaatctccctgtgctgaccccaatctggtgaaattcttgaggcacctctccaacacacacacacacacacacacacacacacacacacacacacacacacacacacactcgtgacgtttcaaggttagaaaacagccctgcagtacccaaatgtaaggaacaaggccagcattctggactaagaacccatcaacttccagaacattgtgcagtagggtctggctgcagagcacctgaaacatgggaaatgtgcttaagtaactgacatctacattttttttttttttttttgagatgaagtcttgtccgtcacccagactggagtgcagtggcacaatcttggctcactgcagcctccacttccagggttacagctattcttctgcctcagcctcccgagcagctggaattacaggcatgtgccaccaccatgcctggctaatcctgggtaatttttgtatttttaatagagacggggtttcaccatgttggccaggatggtcttgacctcctgacctcaggtgatcctcctgccttggcctcccaaagtgctgggattataggtgtgagccactgcgcctggcctgaactctacattttaaaaaattatagttacatataaatacccatgtgcgtcctgtggttactggactggacagggagctctagaatattctgccaaatccagatgcctcactcagcatcttcatgagattttaccaacgttgcttcccatccaggatagcatctgggtgggtgacggatgcacagattaaatgccattttagagttctcttctgcactgctggcactgtacatctcccccagagtaaagtccctgccaagcaacgtggccctctgtggtctcatttcccaccactggtgtgggcaccatcccacccccacctctgcagctagccagtctcctggctgcttcccacacaccccaggcatgcactgaccccagggcctttgcacgtgtcagccccactctttgagatgcctttccctctgacatcctgagggcccactctttccttcctcttttcctggtctttgccccaaatgtcacagaagccgccctcggctcccagcgtgaaggaaactcgcttccgcattgccagctccgtaccattccaccctcaccctgctgtatttttcttcctgtcatttaccaaccccgacatgttgcacgtttctctgcttacttgttaattatctaatgtgcacttccagagagcagagtgtggtgtggctcactgatgtgtccccagcacctagaagacagcgtggctcttacgagaaactccatatgtactggtggaaataatgaattcgatccctgattacttttcatcatagatatgcaccgaacatcagccacactttgggttacccaggtttctacgccctaatctagaaatacaacttccacttccctgtttctatgggaacacagagtctgaatcccaaataagactcagaggaacttttaaaagaagctacttctaaatgactgactccgccaactgcgtgccctcagcagggccacgacgctgcaacgtggaggaggtggaccaggggcgggctgcagggagcggtggggagtgtggcaggctgaagagcacagcctttccagaggggccacgctcccaacccctgccgaatgtccacatgcacagaggctgcctgggtgtggccacgtttcctaatttttcaagagaagctggaaagctgaattttttaatgaaattcctggaagtttaaataccagcaacacattcaattttttttaaattaaaaaaattaaattttaacatctgggcaggttacaatcaagctctcttgggtcagatccaacctccagacggccgacggtgaactttacactacggctcattctatcaaccaaacgagagctgggccccgggcccagactcactgcctgccctgcaggaggttgactgatcacaagatgaatggcaggtaccagccagtgcccagctccctgccaaccagctgcttctaaatacactggataaacacaccaaaagaagaagggaaaagaaataaaaataatgatttgcttggtcactcacatgtggaagagaaaaggctaaaatcgaagctgatactccctcattcagtctgcaagagcctcagtaccgcccctcccggctccgcccacagaacacaggcagcgggggtgaaagtgggcgaagaaccctgtgcacagcaacgtccccaggcctggcatgctgcccggcaagcagctccccgggggcgcatcatcttagcaaactctcccaggaccctgggctgcacaagctcagagactccgcccgtcatgtggggagacgtcctcactctcaggctccacctgctcaccctcccttcacactgagaataggaaacctgagacggaccagaatcctggaggtggcaccagccatgtttcttcaccctgctgcatagccacccaggaacccacagggtgacctgggctccagagtagggcaccaagcctcacggttggagtgtttgcagggatcatggggggccggctggacacaaccacctcctcctgccatggaaggaagtccccatcccacacactcgctggcactgccctggcccatgctgcaggcctccctgggcccccgtggcctgggccagcctctctgggctcccaaggttggcctgttcctacggtagggctgatgctgatgacagtatccacagtcatgaggcactgtctgacccctccacctgcgcgtcttagtgagtcggggcctctatgccaaaacacctgaggctgggtcgattataaatggcagaaatctatggctcacagcgctggtggccgggagtccaggatcaaggagccggtaggtgcggtgcctggggagggctgctccctgctgcacaggtggtggctctcaatgtgtcttcatgggcggaaagacaaggcagttgccttcagccctttttttggagatggagtttcgccctggttacctagactggaatgcaatggcgctgacctcagctcactgcaacctctgtctcccgggttcaagtgattctcctgcctcagcctcccgagtagctgggattacaggatttcgctctatggcccaggctggagtatagtggcaagatctctgctcactgccacctctgcctctcgggttcaagtgattctcctgcctcagcctcccgagtagctgggattacaggcgagcaccaccacacccagcccatcacacccagctaacttttgtatttttagtagcgacagggtatcaccatattggccaggctggtctcgaactcctgacctcaggtgatccgcccgcttcagccccccaaagtgctgggattacaggcgtgagccactgcaccaggtccacctccagccttttgtacaagggcacgaatcccatcacgggggctctaccctcatgatgtaatcacctccaaaaggtcccacctcttcgtgctgccacaccagtgattaaatttcaacacaattttttttttctcagacaggatctcgctctgtggcccaggctggagtacaatggcgtgatctctgctcactgccacctttgcctctcaggttcaagtgattctcatgcctcagcctcccaagtagctgggattacaggtgcatgccaccatgcccagctaattttgtgtgtgtgtgtgtgtatgtgtgggtgtgtatgtatgtgttttttgttttgttatgttttgttttggtttttttgtagagatggggttttgcatgttggccaggctggcctcaaactcctggccttaagagatctgcctgcctaggcctcccaaagtgctggaattataagcatgagccactacgcctggccaacacatgaatttgaaggcacattaagactacagcacctatatgtgatgctatgcaaacttctggacactcccttaactgcagtgattagccccatttcaaagaagtagagaggagttgcattcatctcccctgactgctgcaccgtgacgtcataaattcatttcccctggctgctgcactgtgatgtcatacattcatttcccctggctgctgtgccgtgacatcataaattcatttcccctggctgctgcaccgtgatgtcataaattcatttcccctggctgctgcaccgtgatgtcataaattcgtttcccctggttgctgtgccgtgacatcataaattcatttcccctggctgctgtgccatgacgtcataaattcatttcccctggcggctgggtggtgatgtcataaattcatttcccctggctgttgcattgtgacatcataaattcatttcccctggctgctgtgtggtgatgtcataaattcatttcccctggctgctgcatggtgacatcataaattcatttcccctggctgctgcgctgtgatgtcataaattcatttcccctggctgctgcgtggtgacgtcataaattcatttcctctggctgctgtgctgtgacatcataaattcatttcctctggctgctgtgctgtgacatcataaattcatttcctctggctgctgcactgtgacatcataaattcatttcccctggctgctgtgccgtgacatcataaagtgggtggcttaaacaatggaagtttctactctcacagttctggaggccagaagtctgaattccaggtgttggcagggctgcccacccccacccaaaggctctaggggagggtctttcctgcctctcccaacttcaaggacattccttggcttgcggccacatcactccaatcttggcctccatcttcacgtggcgttctaacccttgtgtgtctgtctcttttcgcttttcttaagaggacatctttcaagattagggcctccccaatccagcatgaggtcgtcttaactcagtgacatctgcaaaggccctagttccaaacaatatcacattcacaggttctagatagacatgaatttacgggacaaacactttgactcagtaagggagcatttggagacttttaagtaaatcctaagtggcctgcccaggggcaccagctgagaagaaacccaagccagatttaaacccaggttctgcagacgggaatgctaggcccctgctgtgccgtctggccagatctgtggctgagagtgggccggtttccttggggcgtctctcctggccgaggtcttgtgcctcagtaaatgcagacccaaaataaaccaccttcttgggtgactgagaaccaggaatagaattctgaaaacaagttccatcttgttcatagaaatggtgttggacacaacacaaaacctttccaagggtgcgctgtggaaaccgtagtcctttgccaattcccagctgcatttgctccctcctcttttaaagtggatagacacaagctgtctagctacttggctgtcttgttcaaataaatggaattttatcaaatcacccagtaagtgcaaaatgcagtctctgggtggcgatggagctagtacccgtctcagtgctgaaactgttctcaagttggctcctatgccgtggcttttctgtgtggctttcgttggtggcaaacagcagagacgcacccaagctgctgacgattttcatgcaaaggtgaggctgcttcagggcagcactctgggggacgcagatggcagggcggccctggcttcgtgtgtccgggggggcctgagcagcagaagtgtgggaactcgccactgacacccacctatggtctctggtagctgctttctgtggctgtgggaacaaatgatcacaaacaaggtggcttcaagcaacaaaccttccatgcagtcctgtaagccagtgtccaaaatggcatcactaagctgaccccgaggtgtcatcagggccatgttccccaggaaggctctgggggagggtccttcccaacctcctggcagcaccatctgatctctgcccccatcccacgtcccaatcccaccgcctccaccttcacgcagcctccttccctgtgtgtgccctacgaggaccttggtgattacgctggcttacccagtgctacactttgaacactggccctttccaatcctcacattaaaatttaatccccagtgtggtggtgttgggagctgggcctagcaggaggtgtccgggccatgggggtggatccctcatgaacagatccacgccctcccctccgaagtgagtgtattaaatcagggatctccagaaggacagaactgataggatacatttacacaggaaagggagttttttaagggagaattggctcacagcatcacaagcagaagtctcacaacaagccatctataagctggggaagagaggagcaggtagtggcccagtccaagtccgaaagcctcaaaaccagggaagctgacagtgcagccttcagtctgtggtcgaaggaccaagagtccccggcaagacactggtgtaggtcccagagtccaaaggccaaacaacttggagtctgctgttccaggtcagcagtggaaggaagcatccagcatgggaggaagaaggaagccaggagacccagcaggcaaggtcatcccacctgcatccacctgcttagttcttgccgtgctagcagccaactggatggtgcccacccatattgagggtgggtcttcctctcccagcccaccaactcaaatgtccaccttctctggcgacaccctcagacacacccagaaacaatacttgaccatccctgcgggcatccctcaatcaagttgatgtgtaacattaaccatcacagtgagtgggttcttgctctgccagttcccactgagagctggttgttaggaagggcctggcacctccctgccagggagctgggccagctcccgcctgtggactgacaggcacgtgcacctctaggagagccgtgtgtgtatgtgtgtgtgtgtctaatagacagtcttacatgaactttacaatttgcccacatcagctcatagaaattgcaatgcagacagcagcacaacagggacatcctgggaccctgcccatggcactcatcggggaagaggaaggtcctgggagaaaacgccatgaccttgttcccacatccacgtggatttccacaaaacagggaaggcacaaccaaacagtcttgttggggctcatttaacaaggaaagaaactcagaaagccacctggagggaagagaagggtccgctgagcagatttcgtgggtttctgaaaagtgcaacgccaggaaccacaatatcacccacggtgtcaggcagccttcatcacggactgtccctcaaccacacagttgcctccaccagcatgatcagaggaactgcagagtgcacagccactggcagagtgctctggcagccactaccatgcgtggcatgagaaaatgtactcatccccctctggctaaattgctaaatgtgggaactcagtttggagctctgtgcaaaaggaaatcagacgaagggtctggggggcaaaagccaggctctgacatttcgggagatccgccctcactttcatgggctgagtcctcccccagtgaatgcactggggacaggccacatccaaaaacgccttgcccgggatccttgagtgaagagcgcaatacaacacagaaccattgccaacggcattcctgggcctctgccatcactggcttagcctgtggcgatgctggggtccatcacctgattgccagagaactggaaattcagttctttgtttctggcttcggcctttctcctccttctatgtgcagtgttaagggttaaggaagaacacggggtctggcatgcagcagcctatgccctgttcattgtccctttaggagctgtgtgacctgggctcttcatccacaggaggccctgcttcgtgggaccacatggaaagggctcagcacaggactaggcagggtgcccccatgcactgaaaggtacccaaaccaccaagcacagtgtcattcatcagaaagacatccacatcaaggccttctttgtcgtttccctcccatttcatccttgtccttccctgcccatattaaatttgggccttattaaaatggagccattctgaacgtctctcattgccactgcctttttttcctgattttctccaccctttctttgcttctggatgtctggttaaaaactgttgaatacagcctggagaccgacagaatgacagcacgtggggagaaggctgccctctccaaaaatacaatgccaggtgctaaagtccctgtatccaaaaaacagtggaagtccctttcagaatgcagctgctgggaggcaggaacaactcctccagtcagttcccctatgcttcagccagggttctccagagacacagacccacggggtgtgtgtgtgtgtgtgtgtgtgtgtgtgtgtgtgtgtgtcctgctgcttctacattcagggtgtatcagccagggttctccagagaaacacaacctctgtgtgtgtgtgtgtgtgtgtgtgtgtgtgtgtgtctgtgtacatagatacatttatatgttatatatgtatatgcacgcagagaatttttaaaagtttagagcttagacacataaaattaaagatagaaatattttaaagagttggctcatgcaatcacggaggctgtaagtctgaaatctgcagggcaggctggagacccagggcagtgttcagcgggaatctggagtctttttctggcagaattccttctttcttgggatctcagtctttttcctcttaaggccttcaactcattggatggggcccacccacatcatggagggtcatcggcttaactcaaagtccactgatttaaatgttaatcccatcttaaaaaacaccttctcagcaacatctagaatattgtttgatcaaatatctaggagctagagcctagccaagttgacacataaaattaatgatcacaggggaaaattattttcctttttcataaagaaaagcacaataatgacaagaaatctcatggcgggtgcatggaagaggacttccaaagaccagtcattactgcttccctgcctgcgggctccagcttgggtgtgggccgggggctgccatgaacagccccacagacccctactcatccctcgggaggaacaggggcttctccaggctgcagggccgacgatgaaccagaactgacctagcacaagaaagcccagggagggcggggcctgctggcacccccactgcccagtctgaccacagtgggcagagtgcataacctcccttacaggtgtgtaaggtggtaatggcagaggagaacacaaggtagccagagaaaccatggcagtcactgtgtagagaaccaagcaagaaaccagtcagggccctctgtccttgacctccccttgctgttccagagcctcctcttgacctcctaggtagacaggtgctatcagctctcccagacccacctcacccctctgcctggagaccctggcctgcagcctgcaccacagcactccctcactgtcctccaactctggcagggctcagccaagagaagagaggcagatattccttccctgagtcctccctgacatgggcctgcgggccccctcctcagccctggctctcctgctcccgggagcatcatctcctctccctgcccatcagctcacaggtgctgatggctccccaagactgctcttctatggggtcctcagcctttaaccccgtccacacctctacctgatcaggtaaagacttttcactggagacagccggtgaaatctgtttcttgccaagaccaggctgacctacctcctaacccaactgttgcaaggttgggcctgaaaaacacgcccctcgtgcgtgcaaatcaggacttcctggggctcacctgtgctcagaaaacaccggtgctttctggtatcctgccctgtcaggacggtgggaacttggagagggcagggctcctgggaagggggcgtccaccccataactgcagggcactcctgctgtgcagaaactcagcagccttgcctcatcttccagtttctccagagaagtcagaaatgtctatttctatgcaaatgtgtctgttttcaaatactgacgttcacattttaaaatcatttttaattcacatattttcaggaactctgggcaggccaaacaaaatacctgaaggcaggatctaacctttgggccaccctgcttatctgcgggatcggaggagaaggggaagtcagttcgtgggtacaacagagtggagaagcgggcccacgtacctggtggatctcgtgccagccgttctcatctttgcagcacacagtggcgtgttcgtgcaggagaagctcgcagcagtagggatcacctccgacgatggctgtgtgatacagcggggtgaggccgtaactgtctttataatctggggatgcaccaagctctaaaagggtctaggaaaaaaaaattgaaagccgtcgttattggtctcatgaccccttttgcagagtgaggtgatccagaaagcagcaccaggaccaccctcccccaggtcaaggcaacccacaccctgagtacccagtgcttctcctgggctccccagaattaagaagggtataacctggccgggtgtggtggctgacgcctatgatcccagcattttgggaggctgaggcaggtggatcacccggggtcaggagttcaagaccagcctggccaacatggcaaaaccctgtctctatgaaaaatacaaaaaaaatagccagcgtggtggcaggtgtctgtaatcccagctacttgggaggctgagacaggagaattgcttgaacctgggaggtggaggttgcagtgatccaagattgcaccattgcactccagcctgggcaacaagagcaaagctcagtctcaaaaataaaggggggggggggcaggtataactttagacaactacatttctagttctgaaatagcaaacagtgcccagaaatgcagggcaggctgacatttgggagacgaggagacctgcagcactcagacccttcctcggcctggtcaacattttgtgccagtggtgtggcatgggcagcaatacagtgactgcaacatttgcggaagagagaaaaggtgcatggtttaacctacatgcccagtggaaaaccacctcattccgcacgctgagggtggcgaacctagcaagcatcgcgtcttcaagaatgctcctgatttccgaggaagccaacgggtacggtgtggctctgcgtccccactcaaatctcaattcaaattgtaacccccagtgctggaggtggggcctgatgggaggtgatgggtcatgggggcggattctcaggaatggcttaacaccacccactcagtgctgctttcgtgatagtgagtgagtgctcatgagatctactgtttaaaagtgtggcatctcctccctctctgtcttcctcccactccggtcacaggaactgcctgctcccgcttcaccttccaccatgattggaaacttcctgaggcctccctggaagcagaaactgctctgcttcctgtacagcctgcagaatcatgagccaatgaaacctcttcttataaattactccgatctcacatttctttattgcaacgcaggaacagactcacacaccaacagaaggggtgcagctgaaatgaagtgaaagtcctgagactttagggacagcgaggcccccgtcttgggggtcaacctgcagcggcacgtcccatccctgctggtgtgggctctggtggaggatgcctgggcgtgcaccaccctgtccagaggcgccgtggctgcagtgtgaggcaggggcacggagcagtaagacagcagcaggggaaggtgaggcgcggaacccacaacagggcaggctcccacggacccgccacagggtgctggggggatctaccatgtggctctgtgtcccctcccaaatctcaattcgaattgtaacccccagtgctgggggtggggcctggagggaggtgatgggtcatgggggcggattctcaggaatggcttaacaccacccactcagcgctgctctcatgatcatgagtgagtcttcctgtggatggggttggggttcaccactggccttacgggttgaaaagacaagtcccttgactgaatagaaggtgaaagatgacttcttgggaaccattaattctgaaagcatcgacaaccaggagagagaacaggaaaatctgaaacctggcttcacttccaagctccagccggaacactgtgcacggactcctagggtgggccggaacactgtgcacggaccccctaggatgggcactgcggggatgggatggggcagccgcacggaatcagagcacggggtggcacccaagtaagatgggcccgagtttaccttcagggcaacttggttcctcgctcgggcagctttgtgtagggcggtcatcccatctttggcacggaagtccaggtgagctccaccatttttgagagctttgatgacctccacagagtcgtccagctgagcggctaaggtcaggggggtctctgaggaacccaaacacacacactttagaaccaacatttgtcacactgctcacaaagccatattcagatgcccaaaactaagctgaaagaactgactcccctcctccacctccagggtgtttacagctcccaccacctgggaaccccaagagtccaggcgggcagcgtggctcaggcacccccgtgcgatgcagtgacacgcagggccacgcgtacaacacagcggtggcagaggcagggattcaacaggactgctgtgtgggccacagtccaagaggctcccttgctgcccttccctctgagtacacagaatcctgtggtaccatctgggtgcttcccgtacagaaggagtgacggactaaagccctcattagagatgggaaaggcagacacccacctttcctcattcaatgtcacatttatgggcatcttgggagatgccagccatgggctgcagggacacaaacacaaatgagacatgaagtccgtgccccctggagctcccaatctgggtaagtggaaaccttccttcattaacgcggcgcaggatgacccaggaggcagggcagaggcccagcagacagaaggatgccgtctgcctttgtagggacaagggtcccgtgcagatgaccctggaccagtctgcagatgagcgtggctaaggacgtcagtgtctattacaacaaatctttccgtccactcttcatctttctaatatgcccaccatggccactgctaaacaagaggaactactttgaggtcctcttttgagagttcctcatttgagaggctcttaacgttccagaaaagtgcacagagtaccaggacaacacacaagttcccatgacccagaaacaccaacaatgaatattcactcggtctcgaagcacattccagtgaaagaaaactcggatgcctttcacaaggcgtgtgtcttgctgacccctcaccccatcccatccccctccatcccagaaagggcacctgccttgtgagtgtgcactgactattcccatctatttttaattgtgatgtttacttatccatacatgggtaccctcctgaggacttttaacattcaccctaggaaccactctgcagcttggcacttcatggtgatatgcacatgcttaacccctccatgtcaggagtgtgctgtgtgtagacatgccagcatcttcattcatcctgtctccatgtgaaaagcaggcttcctgtcttccccaactaggatgctgtgtgtagacatgccaacatcttcattcatcctgtctccatgtgaaaagcatgcttcctgtcttccccaactagaatgccgtgtgtagacatgccagcatcttcattcatcctgtctccatgtgaaaagcaggcttcctgtcttccccaactaggatgccgtgcgtagacatgccagcatcttcattcatcctgtctccatgtgaaaagcaggcttcctgtcttccccaactaggaacgatgttctcatgaatgaatgccattgcacatgactctgttgcataccctcctgatgcagaagttttaaagaaaaatagaaattttctgggactaagggacttcagtggcagtgggggatgtttcttgcatagaaaacagctacaaggcaaggaaggctcagcaaggggtgtggggattgagaccagttggaacatggccagagttccacatgtgcacagagaggtggaaatggggcagacgccagagaaaaacaaactcaaggggtgacccctgcctgctagagagaggaacagtcagcccctcattctctgtctcttccctggtggcatccaggctgaagcacgagtgtccgagggcatctggggagtttattccttggagcataaaggccaccatgggagagtggacagtcagggaagtgactgatcctcgaagggcacgaaaagactggggctgtcgggagccaccaatatcgacgctgaacattcaaatcttacagcgacttaatgagcgtgtgacactcgttcggggcaaggttagccttcaaaacagttaggattttctttcccatttgactgttcccttttgcccaatgcaaaaaggcagtccaaagcagattttttaaaagatattttaaattaacatataattttcatagctgacaacctcagctgttccattttataaatgagaatgctgtctcagagagagctggtggcaagtggtaaaatcagatcagaggcttgaatcctgacttttgactcagaattacagatgcctgcagccaaaccacatcctgttggtcagtgccaggcagttaaaggtggctgcataaacgcaccggtggagaaaatgatcccactctgttcatggctgtgtctcacgtgcaggatggggagctatgtgtggtccttgggtggcttccagggccatccaatgacaagtggcagccttctcaagggttccggaatccctcctcaagtgatgttccagacttgcatgttcacctctggccaggacccaccctggggaggtcaggagaccccctcttcccgccctggcttagccaccacatttgcaaagagcacgtccgctgaggttccacatttggggctgatggaatcacccccgagaagatgctggttgatgagctataaaccggtgacagatataacagcactgcccgggatgcacacccagtgactgcactatcactcccctgatgagcatgggaaccacacagttatctggcaccatgattcttaagactattcctcaggttttgcattttgaaatttctttagttttaaaaatagactggaacctcaacaagcataacctcagagtggccccagtctccctcaacgtgaacaacgggtgggagtagaaacacctgtaatattttgagataacctcagagacacgcagaccctccaactagaggctgcccagcagactgttggctccagggataagcaggatgtgcttcgaaagggtgagaagcgggggctcccggaagcgcagcaggagggcactagccacggctgtttgtcctgacactgggaggtggcacagcaatggggggtggggtgggggcaggaggcaggaggagtgtaagtgtttaagacagctgctgctacccagcgggcacagggcagtgcaggctggagcatgtgtacgccagtgtatgtgtgcacacctatgtgcatgcctgtgtgcctgtgtgtgcatggctgtgtgtatgcacacctatgtgtgcatgcctgtttgtgtgcacgcctgtgtgtctgtgcatgcctgtgtgtgcatgtgcctgtgtgtgcatgtgcatgcctgtgtgtgcatgtgtgcctatgtgtgtgcatgcctgtgtgtgcatgtgtgcatgcctgtgtgtacatgcctgtgtgtatgcatgcctgttgtgtatgcaggcctatgtgtatgcatgcctgtatgtatgtgtacatgcctgtgtgcatgcatgcctgtgtgcatgtgcatgcctgtgtgcatgcctgtgtgtatgtgtacatgcctgtgcgtgtgcatgcctgtgtgtctacatgcctgtgtgcatgtgcatgcctgtgtgtgcacatgcttgtgtgtgtgcatgcctgtgtgcatgcctctgtgtgcatgtgtgcacacccgtgtgtgtgctcctaggtgcatcctagtgtccaagatcagtgggctgcaaaaatcaaacgactgggcaagcgattcttcctatgaggggaagtgactggtgtcaacaaaacccagctctttccctgaagggctgggtggcctccagcaggttttttagaagatgatagttcaggaggctggggatgctcagaaggaaaccatgatgtgagagaagaccacagaacatatcacaggtgtaggaatcaacctcgctgaaagggatggggaatgaaccgctgacctcagtagctccagacatgagtggagtctgtaagactaaaggcaaaaggaacagaataaataaagctgggttataagtcaaccagaaagtgagtgcaaccacattgatagaaataagcaagggattcacaagtgaacgggaggaaggggccgatcttgcaatgcagacaaactccaagcaattcgcatcacttctctgtcctcagggggtgatgcgtagcccgcaccaccccccaccccgatccccttatgtgtgggctgtgcacagtggcttccttctgagagcatagtgtgggaaacagaaaaacgggaccatctctccgtggggaaacctgatggacacgagctcagccaggagatgggggggcagcatcgcccaagatgagccacaccaacaggacgggccctcggcaccaggtgatgagaaaggctctgtgctcttcctcctcacacccacagcccctaatcgtgaaaacaccagatggatcccaataaggggcaccctacaagcacctgaccagtcctcctctgaaactgtccaggtcatcaccaacagggagagcctgggaaacaatcaccaccaagaggtgcccagggagacgaatgagggaatgtcatgtgggaacccgggtggggcccagggacaggaaaggacaagcaggtaaatgcttatgagagaagaaaaaggtgtggacttcggttaataataatgcatcgatatcggttctctaactgtgagaagcgtaccatacgacttccgctcagaagaatactggagtaagatgctgataaggggggaagctgggtataggatatatggtaactctgtgtactatctttgcacttattctgcaaatctagaactgttctaaaatgaaaagtttgtttacaaatgtctcctggctattgtgcgggttaacagatttaatgtaaaaaatgctgctgctcagagaggcagaaaatgtttgtgaaaagcgtataaagtacttgtagccaaattatacagagaacccttaaaactccacaagaaagcaaaccacccaattaaaaagggaacaaaatatttaaatggatacctcacaacagaagatattcagatagccaacacacacgagaagatgctccacaccgtatgtcattagggaactgcaaactaagacagcaattagaggctgtgttcagtggctcatgtctgcaattgcagcactttgggagccaaggtaggaggatcatttgagctcaggagttcaagacctgcctgggtaacatgaggcctcacctctactaaaaatttaaaaatttgccaggcatagtggcatacgcctgtagtcccagctactcaggaggctgaagcaggaggatcacttgagcccaggaggtcaagtttgcagtgaaccatgatcacaccactgcactccagcctgggagacagagtaagaccatgtcaaaaaaaaaaaaaaaaagacacctcaacacaatcgtcagaatgatgaaaatctagaacactgacaacaccaaatgctggggaggatgtggagcaacaggaactctcatcattgccagtaggagtgtaaaatggcgcagtcactttggaagacagtttggcgagttgacacaaaactaaaaacgcacttactccacaatccagcaacccagctcctaggtgtctccctgaatgagctgaaaacttacgtccacaaggaaatctgaatgttagtgtttacagcagctttattcatcgttgccaaaaatggcaaacaatccagaggtccttcagtaggtgagtggatacattatccattgcacatgcagacaacaagatgttgttcaacactaaagagagacaagctgtcaagccacaacacgatacgaaggaagcttaaatgcatattgctaaatgaatgaagccaatctgaaaaggctgcatgctgtgtgattccaactcgatgacattctagaaaaggcaaaactatagagccagtggttggccaggcacagtggttcacacctgtaatcccagcacattgggacgccaaggcgggcagatcatgaggtcaggagatcgagaccatcctggttaacacagtgaaaccccgtctctactaaaaatacaaaaataactcaggcatggtggcacacgcctgtagtcccagctactcaggaggctgaggcaggagaattgcttgaacccgggagtcagaggttgcagtgagctgagatcacaccactgcactccagcctgggtgacacagcaagactccgtctcaaaaaaaaaaaaaaaaaatcagtggttatgaggggttagagggcaagggagggatggacgggtggagcacagaggagggagggatggacgggtggagcacagaggagttttagggtaaggaagctatgctgtgtaattctgtaatggtgggtacaggacaagatgcatctgtccaaacccataacatgagcagaccctcatgtaaactatggacttcagttattgcaacaaatgccctaaaccagtgcatgctgtcaataacaggcgagctggaagtgaaagtgcataggggaaaactccatgccttctgcctggtttttctgtcaacctaaaactgggctctgtccccgaccccaagacaggctcctgtggaccctggcccctgcctccgtgtcacccttaccctcgccactccctctgccgcattttccttactgaaggcacggcacctcgctccatctaagagtcacctatattccctttcagaacatggcagtgtgtacatagaaaaaccctgaaagaatgagacactgtatttgaaataattggacccttaaaaacaggtctctttttatgagaaactgtactgaacaaaccaaaggcactggtagcaaagggagttatttactcgaagtcttccagctccttcattggcactgggtaatttctgcacctctcaccctctgcagatggaggtttacgaggttccagaaccattattctcttgaattgcctcacattcccgggtgccgttagttctggggaatcgcacttggcgattcattcaggggccaacgtgagactgcggagcatgaaccgtcagtcactgcacacatcaaacaagccccttctgctcttcaagacgatgctctgaaggtgctcagtgcactgggacccagaatgtcctcgaggcctcctaactgagcggtgcgggagctgggaaggggctccccgtgacacagctacagcagcaagaaggggaagccggagttggggggcggccgaatgggaggagctcagcctggtatgcaatgagtacaccccgaccctggaaacagattcagtaactgaatctcatcagtgaggtccagacacatcacaggtgctctgcagaatctggatccgtaaaggaaccatctctttttgacctctcattcagatactaaaagagtcgaaaggcatttctagctttattagccagatctcttttgtggtgcctgaggcttctctcaaatttggagacaacagtgcaagataaaagggccaacctaaattttgttcaagttgccaggttcgcttcctgtttggggcttggaaacacaactggtctcatctcagagtttccaaccaaagcaggagaagaggcctgagactctgctggaggaagtctttattttttttttttacactacttttatcattgttacttaataaaatttacatttagaacaggtaccagatggtcgcctgcaatcacacaggctgttttgttttcattgacaggtcgttccactgggatttaattatctcaggctagagggctgcttccctccgctccggccccatgtccagccccaaaacagggacgcggggcccaggtctgcagggcccgggactgagcatggcggcatttcctgagcttagcaaaaaggctgctttcaactctaagcacagactctgctgtcccctgggtggctttgagaagtcaccaaactcactgtggagaggctaaaatatgggatgggaacatgcccaggctgctgccgacaaccaggtggaaagtgggaatgtgaacagcttgtccccgacctgggcctgcctgggtcatccacgtccagccaggccggctcatgccaagagacccctgttcgtcccactgccttttcccccaggagttgagagcagggaccccccagggcaagtggagcccaggccctgcctctgccctccctggtgactcagtgactggcccagactgggctgtggtaacaagatcccagaggctaggtggcttaaaagtgacagacatgcattgctcatggttttggaggccagaagtccaagatcaaggtgctggcagatttggcgtgtgtctacctggttcacatagggcaccttcttgctgtgacctcacctcacaaagtggaaggagcgagggagctctctctgcctcttttgtaagggcactaatcccattcacaagggctctgcccccaggagcccatcacctgctgaaggccccatcctcctaataccatcacctagggggttagggttcaacagtatagaggatgcagacatcagccctagcggccacccagttgggctctcagagcttcagattcctcccaggacagcggtgcctgcaggggacccccttgattacagagctgaggcctggcaaggccctgtgtgctgctggagcacagcaggtcaccaatagactgcagctatcactctttaagtgcccttgttactggtagggtgggtaacagtgccagtctccctgggaccaacaggcttcccaggatatgaggcattcagtgctaaaaccagggcagtcccgggaaaaccggatacactggtcaccctgcctgtttcctggaggcagcccgccaaagccaactctgtgtttctccctctgcatccaaaaccaggagaaaacaacattgactgagctgccgtagttgatgctgatgacaggaacattctggaactctattaaaggtgacgcataccccatacgcttaaccactgatatggtttggatgggtgtcctgcccaaatctcacgtggagatgtaatctccggggttggaggtggggcctggtgggaggtgactggatcatgggggcagatttgtcatgaatggtttagcaccatccccttccttggtgctgtcctgacaattgtgagtgaattcttgcaagatctgattgtttaaaggtgtgtggcacctctctctctctccctccctccctccccccctccccttctccctctccccccctctttctctctctctctcctgctttcaccacgggatgcacctgctcctctctctctctctctctcccttgcttttgccatgcaatgcacctgctctccctttgccttccgccatgcgtaaaagctccctgaggcctccccagaagcagatgccaccagcttcctgtacagcctgcagaacctagagccaattaaacctcttttctttataaactacccagcctcaggtatgtctttacagcaatgtgaaaatggcctaatagcaccacaacgctcacctaacgctcacattttcccggcaccaccgtaggtgttatcattcaatttaggagacaagaggatggaagctgagagaggttcattaacctggtcttcacacagccagctgcagagaagtaggggttaatgtctcctctctgggggctctccatggactggcactgagctgggcattggaagggtcgcctctgcagtcccaacacagggccccccccatcctgcatctctgaagcccagtgtctccaacagtgatgtcatccgtgtggccaggtagtgtctgcatttcagtcaggaggatgcgtatccgtcccttatgctctgccttgacagaagcaaagtgaaggtggtgtcttccctggcagcactgggctctggcctctcgttggaacttgcgtttagcttgtccccactgatacttgctccatgtgtgcctgagggttgctataagccattgtgctggaattacccgcagcttcctttgtttctgagagcacccaccctggttcacttttctcttttcccccgtcaccctgggtcctcacttttctcttttcccccatcaccctgggtccccacttccctgcccctctaacagcactgctggtttctctcctgatttggaaaaaacaaatgagaattcttgagacactggtggcaggcgcagaagctgggaagcagggtggtgtgagaccagggccatctgcgctgtctgcagccgacctgtgggtctgcacttggccttcggtttcagaactttctgccttagttaccccttttccctttttatttgccataagtaatgtttttggccttacaaaaaaatgccactgtgtatgatcgctgttagtttgatctgtacaaaaacccacacacgggtgtttatggcagcttgacccacaattgccaaaagctggaagcagcccagatgtcctttaggaggcaagtggataagcaaactggggtacattggaaaatggaacattatccagcaccaaaaggaaacgcgcttccaagctgtgaaagggcctggaggcaccttccgcacgtgctgccatgtgaaagaagccgatctgaaacccactgtgtgattttaagattccagctctagaacattctggaaaaggccaaactacagagacaatgaaaaggtcagcaaggttgagtgcggtggctcacacctgtaatcccagcactttgggaggctgaggtgggtggatcacttgaggtcaggagtttgagcccagcctagccaacatggtgaaaccccatctctactaaaaataaaaaaattagttgggcgtggtggtgcacgtctataatcccagctaccaggaggctgaggcaggagaatcacttgaactcgggaggcggaggttgcagtgagccaagatcacgccactgcactccagcctgggtgacagagagagactcagtctaaaaaaaaaaaaaaaaaaaaaaaagaaagggtcagcagctgccaggggctcagggatgaagaggggcacagaggagctctcgggcagtgaagctgatctttatgatactgtgacggtggatacaggacatctggcaaaactgacaacgtacaacaccaagagtgaactctcatgtaagctccggactggaggatcactgttgggtacaactccaggcgtaaaccctcatgtaagctccggacttgaggatcactactgggtacagcaccaagcataaaccctcatgtaagctctggacttgaggatcactgttgggtacagcaccaagcgtaaaccctcatgtaagctctgtacttgaggatcactactgggttacgactccaagcgtgaaccttcatgtaagcttggacttgaggatcacaactggttcactgattgtaacagatgtcctatactaaagcaagatattactaacagaggaaactgggggagcagtcaatatgggaactcacagtacttctattcaattttctgtcagcctaaaactgctctaaaaaatcagctctgctcatttcacaaaagggaggcaggggaagaggaagttctgctttatagagaaatatcagctactacaagaagcaaagctggttcataaaattgccatttggcaacaaccaggagagaactgattccataattctgccttaaattttaaaattgaaaataagaggctgggctcagtggctcacgcctgtaatccaaacacttcaggaggctgaggtgagaggactgcttgagcccaggagtttaagaccagcctgggtcacatagggagacccccatctctacaaaaaaacacaaaaattagcccagaggcttgtcatcatgagaatatttcagaacattcataaggtaactctgtgctactgtctccatggatcaggctcccaagccatttctactcagctctgggaaacatggtcaggtctttctcctttaattatgctgcttcacaacggctcacaacaactatggaccttctgctttggtaccggcctaatccagaattccagcggcagaattccaagtatggtggcacgtgcctgtagtcccagctattcaagaggctgaggtgggaggatcagctgagttcaggaggtcaaggctgcagtgagctgtgatcctgccagcctgggtgacacagtgagaccctgtctcaagaagaaggaaggggagggaaggggaggggagaggccaggcgtggtggcacacacctgtaatcccaacacttcggaaggccgaggccggtgatcacttgaactcaggagtttgagacctgcctgggcaacatggcaaaaccccgtctctacaaagaataccttggtgtggtgccacatgcctgtagtcccagttacttggagggctgaggtgggaggatcacctgaacctgggaggatgaggttgcagtgagctgagattgtgccactacaatctagcctgggtaacagggggagaccctgtctcaaaaaaaaagaaaggggagtggaggggtaatgatttctgtcaaggccaaaaccaaaacacaataaacccccaacctctatgcgtggtcaccatctccctgggtgacgcagggaagtgtcccgtaaggaagcacgcaggcattcttccctgcacgcattctgtccttgagcaccaaacccactgggccctgtcccagaccctggccccgtgggtctctgcctttgctggagaccctagaatgcctgtccttaactatgtgctctttcccaggagccacttatcggggacctgatgacaccaggggttcctctgtcttctctgggtttggtctttgtgatcagtaaaccagcccagaggcttgtcatcgtgggaatatttcagaacgttcggaaggtaactgcgtggtaccatctccacagatcaggttcccgagccttttctactcagttccggggaaagtggtcaggtctttctcctttaattatgctgctccacaacggctcacaacaactatgaactttttgctctggcaccagcctaatccaggatttgagtggcagcagttttaactccaggcaggacccagagaaatcgctgcttacctgtttcagagtctgcactgatgtgtttttagcagtgaattgagagtctattctggaataacagtcatctcagaaccttaaagtcgagacattaacagtctggtggaggaagccagggggaggcttggctcaggacaggggccaattacagggggcacatcaggaagagaggtgcagagcagctcagaggggacatccagcctccttctactgctggccaggccaaggcgagacagagagccacgctgcccagtcccccgcagcagcatcagaaatagccctcgacgaggccaagatgaagacataagtggctctgccagggtggtgagagccacggccaaaggctgcctccagggagaatccgggtcagcagctcagaatgaaggctgcccctggatgtgccccaaggctcaaggtcatgctcaggagcacctgggtccatttaccttcacagcctcacatggaaagggctcatgccctcacagagccaggagctggcacaggggccatcactgaagagaagctgccacatcagcgcagcacgagacgcatccacgtcagggaaagatggtcggccagggccctcccaagcctcctacagacgtacacgccctccatcgcaccaccatgcctgagctcaggcctctctgcttcccagctcagctcctctcctcctcccactgcctgccccacagctgagggccactgcagctgcccacctgccctccagatgccctactacccacccctgcccaccacatgcccttgtcccaatcactccctttcccctctccccttctccagatgtccctaccaacacaagcccaacccagcctcctgctccaggccaccggctgagactgcccagacctccagcggaagcccagccttgtccacgtcactgccctgcaagcagacccccaggcttccctgcctcatggaggatcggcgcagggcctggggctgctcagctgtagccaggcactcaccttccttctttccccctatccccgggggcactctgtcccctctgagcctcgctcatgcagtcctgcctcccaacgtcacaggcatcaaagctaccagcagccacaagcccgtgccggcttctcctgctgctcacagcgaagcctaagggacacagacaattgcaaaaaggcaaggacagtcccccggcagtgctcagacagagctgtgcaggctgaatccacacccagcgggcccccccccagcgttcagaggtcgagggggctcccacaaatgatgagaaagtggcattctttggttgacaaacacatttgttgtgtattttatatttttgaggtgtgacaccagtatgtgatgatggcactataccatgcaggggccagaagcagggctggcacactcaagacaagaggggagggagtccaggaggagtattcccagcccaggacagcccacctgagggggcatactctgctttgcatggagaccctcacctccacccctcttggttctccagtaggacctaacctctgcctgccaactccagctggtgccctgctggcaagagactgtcacctggggtgacagtgcccacacccagggacagtgggtgatgtctggagacactgttggttgtcacaactaggggttgctattgatgctgagtggaggcgggtactgccactgaaccctgtgatacataggatggccgcgctgcaaagactcacacactcgtggaaccaccaagggcctgggccatctttcccgaccgatgcccagaggcccgcactcatgaggaatgtggtttccagcaggggaataagatgcatgggtgcagatgcccatctgctgggctgcccgtgcccagcgggaggcagaaacacacatcctccacctttacaaacatacgtgtctgtaaagatctgtgtgcccaaggctggcacaacacatgcgtgtcatctgctcattcattcactcattcacctcctcaacaattctgcactgaacacctgccgtgctccaggccccacgcaagatgctggggatgccccatggacaaggcgggctcggccccttctgactgagaagacagaggagagtgagaatgcacctttaaacaccaaacaaaaccaagtaaaaggtaactgcagcgttattcacaggtagcctgagcagtgggctggccttctctacgcttccgtaaagcctggtaaggtcccctctagcaagtgctcacctccggtctccgggtcgtggaaattgggatccaggcctcggtccagcatcttggtgatcttctccaccaagcgatgctgaatgtgatccatgcatttcttcagattggtctagaaggaaaaacaatacaattgaaacatctttataagaaatgtcccaacctgagcaacaaagtgagaccccgtctctacaaaaaatagaaaaattagccagacatggctgcacacggtggctcacgcctgtaatcccagcactttgtgaggccgaggcgggcagatcacgaggtcaggagatcgagaccatcctggctaacacggtgaaaccctgtctctactaaaaatacaaaaaattagtcaggcgtggtggcgggcacctgtagtcccagctactcgggaggttgaggcaggagaatggcatgaacctgggaggcggagcttgcagtgagccgagatcgcgccactgcactccagcctgggcaacaaagcgagactccatctcaaacaaacaaacaaacaaaaaattagctagacgtggtggcacatgtgattccagctacttgggaggctgaggcaggaggatcgcctgagccgaggctgcagtgagctgtgttcatgcctctgcactccagcctgggcaacagagaaagacctgtctcaaaaaagaaaaacaaatgtctttccaggctctgggaaagttcctgactggtgcactcgggagacccaccctcgccagggtgcaccacaagccctgaggctcctggagctgaggcttttggaaccacagggtgagcacagtgtctggcacgtgacaagtacaatcggcctatcctggatgaatgtttaaaatcccctcaccgttcgccatcctagtgctacggacttaacgtgtgtgtccccgcaaaattcataggttgaataatctccaatgtaatagtatggagaggtgaggcctttgggaggtgacgaagtcaggaggatgaagccctcgtgaatgggattagtgtccctgcaaaagaggtcccagagagctccctcgccccttcctccacgtgaagacacagcaagacaatggccatccaaaccaggaactgggccttggccagatgctgaacctgccgatgccacgatctcagacttgcagcctccaaaatggtgagagtcacacttttgttgtttataagttacccaaggtattttgtaaaagcagcgtaaatggcctcagacacttgctgagagctatgaatgctcctttgctttcgtaagagacagctgggccgctggagcacttttccaatctccagtttccaggacccacctcctgcctccatccccagggagtgaggcccgcagattggtacttaacccactttgtggtgaaccccatggccacacaggcagaaatagcgatgcctggtccccgagtggctcaaggtgaagtgcgggactcatttcctgtgaggtcatgatggtccgcagatcaacctgatggggtgggaactttcccagcctctgccagcctcgctgtaagaaaagtcatgattctctgcccatccagagccagtctgggctgtctgagcaggactgtgggacttggcacccttccgcctgctgcgtctaacactcctcaccagcctaattctttgcccctactccgtacctctctcaaaacacacagaagggggacaaatgcggcttctgacacagcaggttcctgggcccttcaacctcctggcacgtgctagatttccacctgcccattttctgtatgtttcggaactagaactgatcaaatgccctcaaacacatgacttacacatggtgtcactgaaaacctgcattgctatttacaaatcagcatttttaaaattcacaaatacgtttttatctgcacatcagagggtgataaaaaacaaaagccaaaacccagaagcacccagatcttgccgtctgaataccgctttccaggcaaattccagggcagaggcaggggaagtatcggaagagcccagagcatcttgtgccataaagtggctggtgtgtcaaggatggtggggatgcaccacatggcagaacaccacaggaagggcaactgccgcccacatctggacaacttgagcacaaaaatcaataatgataatgacagattagaactcagtgagcacagtaagaatcctgccgggcacagtggctcacgcctgtaatcccagcactttgggaggccgaggcggatggatcacctaaagtcaggagtttgagaccagcctggccaacgtggcaaaaccccatctctactaaaaatacaaaattagccaggcatggtggtgcatgcctgtaatcccagctactcaggaggctgacgcagaaggatcgcttgaacccgagaggcggaggttgcagtgagccaagattatgccattgcactgcagcctgagcaacacagcaaaactctgtctcaaacaaacaaaaaagaatccttgcatgcatctgatataaggaggaggggcagcaaaacaaaaaccgagaggatcctgctggctgagaaagccattggtgagctcgcagctgcaggggagctcacctggagagcatcagggccctcaaagggaagcgcttcaggcagctgcccggactctccaccccatgctctgcagggagtgcaattgggctctccttaggaacagcaccaggggccaggggccaggacaaaagcctcctgggtattacagattcctcctcctgttggttaagcaaagtgctccgcccacacaccctatgcctcagccccctctccacgcctcctcctcgactcgcacagcaccctgaaagacagcagggtgttcatggtgtggatgtcttatctgggactctgagctcaaggcatagtgcattccgccaggttctgaacactctgtgcaacgcccctgctgctcacctgcagtctaacttcagtgcaatttatgtgaacagcactttaacaaggtttttcctgaagcaacaacagcagaacactaatacggggctcactgtggacccgcttccctccaccacgccaggcgtccagatcccactctcttcagagatgccgcttttgaccctccctggagcagccagtaggatctgcctcccttcccccagcacccacggccacactaagcagcccctgctgcctcccgggtgggtctccgcagtgtgcaccgtaagggccagtctgcctgtacatcccagcccagccacacgccatgccaggtacacagcaggtgcccctggaagaggagcgtctaaagataacacaacaagataacaaggaggacgccgcctgcctaacgtgtaaataacagcccgttccctgcataccttcgtgtggagcttggccaactgtttctcatcgagactggcttgtttatacacccgcttcttgtatcgaaactggcacagaaaacaaaaaagagagagaaaacaagtcaatacttctcagagttgttcagagggaaaacgggccttttccttggctatgtcacagaagacggggaaccccacagcaaacttccagttttaaataaatgactggtatttgcaccccagagcctacaacatcctcagcatcacttttgtcaagattctgtagcagtttagctaaaaagccatataaagaaacaggagcaaggggaagggaagatcctgcaggtgagaagctgggaggtctccctcccggtgaccggctccccagctaactgagtggttatggttcctcccaggggaatggatcagcccttggcaaggcatttttggtaaatgaggatgctgcttcaaacaccaggtttttctcctacattgtccacctttgttaaaacacaccctaaaagcctgggctgggaaaggccccacctcctgtactcctgcaacctctgcccagatcgctgaagccactgtttttccctccaaacagcagcgcctcctttgaactggaaattacatcactgcatgaaccaaggagcacatcttcctcagatgcacggagtaagcaacattgtcggagtgggcttggtgagactctaaaatacctcctccctcctccagccccccgcttggctggagatgctgcagaaggtctgggaaggatgctgagcatttaggagtcactggagtttggagctgggacctctgttccaatcccagccctaatgctctcaactcacagagttaactcagggctgggcactttcccatctcagtttccttatctgccccatggggataatagcacccacctcccagggtggcctgagcattgaatgtgagcttcctggcacagacctggcactagacaagtccactttatctctccctccttactgcccttgatgccgtcaccctgcacggttacacatgtgctcagagccagcaaaaaccgcccctgggtaaaatgatggtgcggggcaggtggcgggtgagctcatcctgaaactgaaagtcgcatctcacagaaaagcttccaaataaacaaccctagtctcctttctccaccacgccaaacaaaatggctatttgacaaaagacaaaattcttgtgcacagactgatacttgtggggttttgttttcaactggccaaataaaccagctgtgaaatcggaaagttctgtgaagcgcaggctgcacagagtttggggagaaagtgcgctggtcagaagggcatccattcatttcccagaacagagcaggcaggaggagctacaggcccattttagaacttccacttctgattctagatttcaggacagcaggttctgtgcgtccatgccccgggaccaatcacacctctggtccagatttcagaagccactgagaatgatgccaggtgccttctcaggctcatgatcatgtggctaagcttaaaagtctcagggaattcaattccacggggcccctttccagacataaaacaatccgcttgggcccacagcatctctggggcaggagggtaaaggactcaaggagggagtgtttattccagagtcacaaacatttatagcccatagctacagaggacaccggctcaggaccacagaccctttttcttgctatttctccaacatttcataagcagcccaccatattgtgctgaaattatctgaggcaaagagcccagactgatgcccgcccctaatgtgtcaatccctgagccaatctcagcctttgcagtgggtcatgcaaaggagattaataaacctaagtatcggcatcaattttggccgggcgtggtggctcacgcctgtaatcccagcactttgggaagccgaggcaggtggatcaacctgaggccaggagtttgagaccagcctggccaacatggtgaaacccatctctactaaaaatgcaaaaattagctgggcgtggtggtgggcacctgtaatcctagctattcaggaggctgaggcacaagaatcgcttgaacccaggaggcagaggctgcagtgagccgagatcacaccactgcactctagcctggatgacagagcgagactcggtctcaaaaacaaaacaaaacaaaaaacaaagtatcagcaacaatttcatgacaatgaaaccagagcagcagctgcaaagtcaatttggggacttgtggatggccaggctcacaacgcacacactgctccatgaacacttcctctgggcctcacgaccactcccggacatcactactaacattcactcaatgtcatgaatgggaatccggggctgagagagcatgggtggctggctcgaggttgcacagctgcaggtactggggccagatgtagaggagactcccaaattctctggtcttctcgcccagttttcctgccgttatggaaatgatcagcccctgaaatgaactgcatggatttactcttcctggtccatcacctcccactggagtgtaaggtccgtgggatcagaaccttgacttttctgtgccagaaaagtgtgtggtccttagttggccctcaatgacaatttttttcccaatggatacccattttacagataagcaaactgaggccaggacagctgagtgatttgctctaaaccacacaacttccaagtggcatctcatctttttctacactgaaacccctccctgaatctgacacatggtccacactggggatcccaataacctcagcctcagtgtcacaacggaactgagaaacgtgcagacgcggcatcaccttagccctgggtgggcgtccatgacatcttgggcttcagaggaatccctagtcactgagtagagaacccacttaggttgctcaagtgccagctgcaattacacacatgcagcctcttgctgttgactaagctaaaatgagtgcaatcgctgaatgatgccaacatgttgtgcaggagtagaaatgatccgtttctggcttctcttaactgacgtaacccaacacgtatacactgcaggaaacaatgcctgtaaacttggggcgtagcaagcctgggtgagagaggtagggacaggggtcgtgcatcacgtggaaatgtgtagggctgccccgtcttacggatcagccacttctggagggaggcccaggagcttgtggctgctgacagcagctcaaagagccccggtcacccgggcaggaagcagaagtgaagctgtgctgttgagaacagctggatggtcacagccgccctgttactcaaggactcagagatgaattggagaatggtatggtttgactgtgtgtcccctccaaacctcatgttcaaatgtgatcaccggtgttggaggcggggccaggtgggaggtctttgggtcctggggcggatccctcctgaatggcctggagccctccccatggtagtcagtcaattctcgctctgttagttcacgggggagccaggaactactcctcccctgctcgctctcacaccccctcttgccacctaacatctgctcctgctttgccttctgccatgagaacaagctccctgaggcctcaatgctgagcccatgccggcaccacactttctgtacagcctgcagaaccgtgggccaattaaacctcctttctcttagccagcctcaggtttttttgttgttgttgttttagatagagtttcagtcttgtcgcccaggctggagtgcaatggcaccatcttggctcactgcaacctccacctccagggttcaagcaattctcctgcctcagccccccgagtagctgggattacaggcacacatgaccacacccagctaatttttgtatttttagtagagacggagtttcaccatgttggccaggctaatcttgaactcctgatctcaggtgatccaccttcctcggcctcccaaagtgctgggattacaggcatgagccacctcacccagccagttatttctgtatagcaatgaaagaacagactatcgcgaggaatatgatgtaatttaaaaattccttctttgtgcctgactcctggcagagttcctaaaacctttgtactgtcctcagtgataagagtatctctggagcactaatgagatgactctcaactcccaggtagcttccaggatgggggctggtggccggaaggatcagactatgactcgagggtcaggactcccagtcgccctgctgactggcaggatggagtccaatcaccatggtcagtgatttcatcctatgtaatgcctatgtaatgaaacttccataaaaatacctcaacaatggggcctgggggcttctgagccagcaaacacatccacatactgggagggtggtgcacgcccaactccacagggatggaagctcctgcacgctgggccctcccgacgtcgcctagtgcacctcttcatcagctgtgcgtttgtacactttgtaataagccaggggtagcagttaaaatgccttcttaggttctctgagctgctccagcaagggatggaacccaaaaagggggtggtgggaacccctagttcacagccaaatgggacagaaatgtgggtggcctggggacttgacgtttatggagggcagtcttatgggactgagcccttaaacttgtagttagtgtcagaattgaattaattattgacatccagctggtgtctggagaggtggagaaggaaaatacaccacccattaggcgctgggaaggaaaaatttaaaacccctcagagaagcatggggagccccgttctccatgcccagggcccatggtcctggttatgaaagcctgaatcagacccacggtttattattcacagcaagatttctctgcagggattctttgaatctgtagtgaaaaaaaaatgtataaaagttgtacaacagtgtgagattcatggcaaaatcagaagcaaccttttattagtccattttcacactgctataaagaaatacctgagactgggtaatttataaaggaaagaggtttagttgactcacagttccatatggctgcggaggcctcaggaacattacagtcatggtggaaggcgaagggaaagcaagcaccttcttcacaaggcagcaggagagagaacagcaaaggaggaacttccagacacttataataaaaccatcagatctcgtgagacctcacttactatcatgagaacagcatgggaaaccgctatgatccaatcacctcctccctcaatacatggggattacaggtccctccctcaacatgtggggattacaattagaggtgagatttcggtggggacacagagccaaatcatatcaaacctcaagaccccagactgatttttaaatgtggggataatttcccaatgcaaatggaattggtctcgccccaccaccatgtctcccccacccaccatggcatccaggctgtgacacaaccacagtccatgcactgtgggctgaaatatacctccagggaaggaacgccctcacccacgggctgtgggtactcgcgcaggagccgctcctcatccaggaacttgccgtcacgcccattgctggccggctggaacaggccgtagttcaggacatctttcaaactctgggttaatgtacacaggatccgctgctttgcaacccacactgtggcatccgggttaaatcgaatgcatttctgccaggaaggacaaagacagctgatgagtgacagaggacgctacctgagtcacccatgtggggcgcgtggtcagagaggcaaagctgcttccaccccttcccgacacttcctctgagcagtgaacccacggcttttcacagtgaaaaataaagcctactggttgctgggacacagacattcggtaaatataaaagggaaaaaggaaagaccgaggcattggtctctttggccttgatctcaccatggactcaaatctccagcactggccgggtgcggtggctcacgcctgtcatcccagcactttgggaggtccaggcaagcagatcacaaggtcaggagatcaagaccatcctagccaacatggcgaaaccccatcgctgctaaaaatacaaaaatttgctgggcatggtggtgcgtgtctgtaatcccagctactctggaggctgaggcaggagaatcgcttgaatcagggaattagaggttgcactgagccgagattgcaccactgcactccagtctggcgacaaggcgagactccatctcaaaaaaaaaaaaaaaaattctctagccctcatagtgtctttttggtcatcaatgaccacctgtcacctcagggccctctctcacttgcatggcacttctcaaactccagcagtttgaaaaacacaggtcagagaccccacttatgtctccctaacatgatgtctgattcagcaggtctgggtgggacctgagaacctacatctcagacaaatcccaaggtgctactgctgctgccgtcctggggaacacacattcagagccacagcccgcgcatatttcaatgtgacttaattttgacatggatcgttctttagcatttcagattcggtggaagccttgtcttataaccacactgacgagaaagttttcatactacctacgctgactctgaacacaaaagctttaaaaatgcagtcatcacctctcctcccaaaggacacaggaaagcaattacggaaaaacgatttgatggaaaatcaaatcagttgccatgagagttcatttttgcaaagttaaatagtgtcaacagggcctgcaaaccaatcacaacacttcaaacatataatagcacctctgaggactgaaataacaacaacttggtcatgttcccaggtcccctctgtgagactcaccagtgagccaggaaaggcaaaggccaggcaaatccacttctagccatgacttctaatttttgttgaattaaaattatattctactgaacagctgtcagcaggggctcaataattcactttgtcactgtcaaagtgttcagaacaaaaggaggtttgattgaatataagactcaaaccaattctctatctgaggattctgtgggtttgtgcccaagaaagcaaaaggccctatcatcttcccaagacagcccgagggtaagttcctcatcgctgggaaaatgatcctgggacggccaacaggaggtcgggttcagtgggcggccagagtcctccctgccaggaaacctgaccctgtgcacaaaagctcctgtttctcccttccaatgtcaaaggctgagctcacgtgtggctctcaaagctccccacagggctgtgaggctgggtgggggcagttgtttattccagaaagatttccagacccgcaccctcccccatccttggctaagcaaggactctctggaaactcctggcacaagaaacaagctgtatcaggtgtgaccaggtggggccgctcactactcacccttcagttgcaggaatccttctaggcccctccaattcaagctccaacatccacagagcccatggctccctccctgacacctgcagagaagcttcagccaaggggcaattccttggaggagcacagggctccaaactgcctctcaggggacttctgtgccactgcaggtgattgcaaagataggtgtccaccgtcatttgtggacagggtggggatgctgtgtctgtgcagcacgggggccaaccccacaaagcaagaaccatctgctccagaaaatgctaagagcaccaccttgagaatcatctagaaggagcaagagctcaaaggtcggaaagcctgggtttgcaacccagtggggcacaccaaccttgattcctagggaaacccacccacccagcagtcctctgattcccccatgaaaatcagagccactacttaacttcagggctgctgtcaggatcaaacagaatataaataagacatgttgttatgggctgaactgtgcccctctaaataaatgttgaagtcctaatgcccataccctatgaatgtgatttatttgggaataggatctttgcagacgtaatcaagttaagatgatgtcatacaggagcagggtggaccctaatgcaataactgtgtccttaaaaagggagtaaatctggatattagccctttgtcagatggacagattgcaaaaattttctcccattctgtagattgcctgttcactctgatggtagtttcttttgctgtgcagaagctcttgagtttaattagatcccacttgtctattttagcttttgttgccattgtttttggtgttttagtcatgaagtccttgcccatgcctatgtcctgaatggtactacctaggttttcttctagtgtttttatggttttaggtctaacatttaagtctttaatccatcgtgaattaatttttgtataaggtgtaaggaaggcattcagtttcttctgcaaagaacttaaacaaatttataagaaaaaatcaaacaaccccatcaaaaagtgggcaaaggatatgaacagacacttttcaaaagaagacatttatgcagccaacagacacatgaaaaaatgctcatcatcactggtcatcagagaaatgcaaatcaaaaccacaatgagataccatctcacaccagttagaatggcgatcattaaaaagtcaggaaacaacaggtgctggagaggatgtggagaaataggaatgcttttacactgttggtaggagtgtacactagttcaactgttgtggaagacagtgtggcaattcctcaaggatctagaactagcaataccatttgacccagtgatcccattactgggtatatacccaaaggattataaatcatgccaccataaagacacatgcacacgtatgtttactgcggcactattcacaatagcaaagacttggaaccaacccaaatgtccatcaatgatagactggattaagaaaatgtggcacatatacaccatggaatactatgcagccataaaaaagaatgagttcatgtcctttgaagtgacatggatgaagctggaaaccatcattctgagcaaactatcgcaaggacagaaaaccaaacactgcatgttctcactcataggtgggaattgaacaatgagaacacttggacacagggcaggggaacatcacacatgggggcctgtcttagtgtggagggttgggggagggaaagcattacgagaaatacctaatgtaaatgacgagttaatgggtacagcaaaccaacaaggcacatgtatacatatgtaacaaacctgcacattgtgcacatgtaccctagaacttaaagtataattttaaaaaaaagtgagaaaatctggacacggcatcatgcacacggggagacgaccacgtgaatgggaaggcagagactggtgtgtcccatctgcaaacccagcaatgctaagatttctggtaagcccccagaagctggggtagaggtagagaatctgggacagattccccctcaagcctcagaaggaaccaaccttgcctaccccttgaccttggacttccagcctccagaatttgagacaatacgtgtctgggatttaaggcaccagtctgtggttggttatggcaggcatgggaactcataaacgtgtgaatcacctgccactaattgtggcagcaaaaaaacagcagcatcatcatctctgagagcggaactcagcaggtcgagcattcccagctcccagggagctcccctccctccatacgtgatgggagccacccacgtgttcacaccagctcccggcaagcccacgacgtcagaagacactttggatgaatcctacttcaattcttcacctacccatcattgactcactgtccaatcaggcaaaccccaggtccaagagcaggcctgacacagtacaggtgactgacactggctgaatgatgtgggagccacaaagacaataaataagaagcaaaccagcctgaggtcaccatttgtagtggggaaaaacacctactcaactgtcacacaatatggaaaaggtaaaaatccatgctaacacgagctcccttggggacccagaggaaggagtaagtgacgctgcttggtaaggagcacacatcataggctgctgcccaggaatacagagggatatgcgagtctggggtaggacttccaggttgagggcccatcataaggagagggagggaggcaaaggtagaacagcgatgagtctagcaggtggatggcccaagacagtttctgccttaagtgacccttcctggtcccactgttaccagtgtgagccttggtcatgtcaagttctccttgaggagaacagtatctgattctggtctccccacagccctgcgaggtggctattcctttataatttgttagagatgttctgagtgagtgagtgatttgttagatgactcacagatagtacagaaaggatggcaaagacaacagtgtataggaagtcccaaccctggccaactcctctaaaggattactggaggaaacaactctcttctccttgagcttctatcttctgtgcacagggtcctataccagcaccaggacaggagtgggtgagaggacacgaagatgaccaagatgtgctcttgccccttaaagagttcagtgtctacagggaggggatgatgatgatggtggtgatgctgatgatgagggtggttgtaatggtgatgatggtggtggtagtggtggcagtgatggtggtgataatggtgatgatggagatgttggtaatggcgatgatagtgatcatgatggtgatgatggtgatggtgattgatggtgataatggtgatgatggtattatgatagcgatgatggtgatggtgatgatggtgatggtgatgatggtggtgatgatgatggtgacaatgatggtatgatgatagtgataatggtgatgatgttggtgaaggggatggtagtgatgatgatggtgatggtgacaatcatgatgatagtgatggtgatcataatgaggatgatgatggtgatgatgacagtggtcactgcaatgatgacagtagtggtgatgatgaagatgatggtgatgacagtgataatgataaccatgacacagtgatgattaccatgtattgaatcctaataagccagaaattacgctaaccttatcaccttcaccacaaccctaagtggatattattattactttttgtataatattattattactgtttatataataatattattctcattctctagataaagaagctgagcctcagagactccaagtaactaccccaaggtcacacttctagaaagcagtagaggtttggtttaaacccaagtcaaatctccccatctcccgagttcttgctgttcaagtgatagatgatgttcctctctatacacacccactgccaatcttagtgcaggcaaatcataaattagaggcatatcccattctatttcacttgctttattgagcttcacagagaaggtgtttttgcaaattggaggtttgcggcaactccgcaacgagaaaatctatcggcattatttctccaacagcacacgctcacttcatatctctgtgtcacatatgagtaattcttgtactgtcaaatttttcataattattatatctgttaggatgatctgtggtcagtgatctttgatgttactattgtcattgttctggggtggcatgaaccacacccatataagataggaaacttaataaaagttctgtgtgttctgactgttccactgaccagctattctcccacctctctccctctccttgggcctccctatgccccgagacacaataatattgaaattaggtcaagtaataaccctacagtagcccctacgtgtccaagtgaaaggaagagtcacacatctctcattttaaatcaaaagctaggagtgattaagcttagcaaggaaggcatgttgaaagctgagtcaggccaaaagtgaggcctccagcaccaaacagtaagccatcgtgtgaatgcaaacaaaatgttcctgaaggaaattagaagggccactccagtgaacacacaaatggtaagtgaaacaggccttagtgctgacagggagaaggtttgagtcaccaaactttgatgatcaagacggtcacaacattcatttaaaccaaagcctcatccagagcaaggccctgactctcttcaattctctgaaggctgagagaggtgaggaagctgcaggagaaaggctggaaaccagcagaggtttattcatgaggctgaaggaaagaagccatctccataacaggaaagtgtgaggtgaagcagcaagtgctgatggagaagctgcagcaagttctccagaagatctcgctcagatcattgatgaaggcggctacactaaacaacagattttcaatgtagacaagacggtcttctattgaaagaagatggcatctaggactttcatagctagagacaagaagtcaacatctggcttaaaagcttcaaaggacaggctgtcttgttaggggctaatgcagctggtgactttaagttgaagcctatgctaatatatcattcaaaaaaaccgagggcccttaagaatgatgctaaatcaatcggccaggcgcggtggctcacgcctgtaatcccagcactttaggaggccaaggtgggcggatcatgaggtcaagagacagagaccagcctggccaacatggtggaaccccaactctactaaaaatacaaaaattagctgggtgtggtggcaggcacctgtagtcccagctacttgggaggctgaggcaggagaattgctagaacccaggaacaggatgttgcagtgagccgagatcatgccactgcactccagcctggtgacagagtgagactccgtctcaaaaaaaaaaaaaaaaaaaaaaaagaattatactaaattaactctatctgtgctctataaatggaacagcaaagcctggatgacagcacatctgtttacaacacatgttactgaatattgtaagcccactgttgagacctaatgctcagaaaaagagattcttttccaaatattgctgctccttgacaatgtacctggtcactcaagagtgctgatggagatgtacaaggagataaacgttttcatgcttgcatacacaatatccattttgcagtccatggattaaggattaatttcgacattcaagtcttattatttaacaatatatcttgtaagactatagctgccacagattcctcagatggagctgggcaaagtcaagtcaactgaaaccttctggaaagaatttagcattccagatgccattaagaatattcatgtttcataagaggaggtggaaatgtcaacattaagttcggaagaagttgattccaaccctcataaacgactttttttttttttttttttgagatggagtctcattctgtcacccaggctggagtgcagtggggcgatcttggttcaccacaacctccgcctcccacctcagcctcctgagtggctgggactacaggtgcccaccaccctacccagccaattttttgtatttttagtagagacagggtttcaccgttagccaggatgatctcgatctcctaacctcgtgatctgcccacctcggcctcccaaaatgctgggactacaggcttgagccaccgcgcccagctaagaatattcacgattcataagtggaggtgaaaatatcaacattaagtttggaagaagttgattccaactctcatggatgactttgagggattcaagccttcggtggaggaaggaactgcagatgtggaaatagcaagagaactggaattagaagtggggctgacgatgggactgaattgctgcaatctcatgataaaacttgaatggatgaggagttgcctctttgggatgagcagaggaagtggtttcccgagatgcaatctactcctggtgaagatgctatgaacactgttgaaatgtccacacaggatctagaatattccataaactcagtggataaagcagtgcagggtttgagaagatttcatccaattttgaaataagttttactgtgggtaaaatgctatcaaacagcattgcatgctacagagaaatcgttcgtgagtcaattaatgcagcaaacttctttgctgtcttattttatggaattgccacagccaccccaaccttcagcaaccaccactctgatcagttggcagccatcaacatgagacaagacactccaccaacaaaaacattacaggccactgaagatgcaggtgattcttaagtatttttaacaaagtattttttaattagggtatatacactgcttttttagacatgatgctattacatacttaatagactacatagagtataaatataactttaatgtgcattgggaaaccaaaaaatgtgtgtgcctcattttattgcaagattcattttattgcagtggtctggaaccagactcactatctctaagatatgcctgttatgtaagtcattgagaatactgaagaagatgttgatgttcaggtcatttctggatcagaagacatattccctttgttcagaccttccaggctgcatacaaccccgcgccccagcctctggtggaccagccatcctctccgcgtctgccggctggagccccactctcctttccaccggggccgaggtctcacgatgtcatctccctggcctcctgcaggctgagctgaccactgggcaccttgggtgggaacacaaggagctgctccgactgcccacggccctcaggccagctgactggccctgctccctttcctgtctggcccatgagtctcggcctcttcaccttgcatttcctgtctcccaggaaggtgggagcagtgctgagtttcatattttgccttaggatgtttctcctcactctctcctaactggtaggcaggagttggtccctctgtcactcaatctcctaaaggctgtgatgtccagatccttccgaaacctgctgcgtgcctggcccaaggggctcaagacacagaaaacctgcaaatggatgtaacgagatctccgagacacaaaccaggctgtcttctcccttatctccagaaaggcagtacatacagcatgagacctgggtggtgatggagtgggacaggggctgacatggtcaggagctgtggagacggagtttgtggctgacaccagccttgcgatgatgtacacaccgatcccggaaagttctcaggacttcttcaggccagcctcagttctctctaagttcccttcataccacaaagcccctcagccacaaaagggagctgtgtcctagcacagatgaaccatccacatcttcccgtccctcctactcctccccatctctctctcccccgacatctgtctcagcaccactgcaacgtccagccagttaagtgctcctccctgccccagcccgagctgcctgaggacaggggtttctttttttgagtcagagtctcactctttcgccaggctggagtgcagtggtgcaatctcagctcactgcaacctccacctcctgggttcaagcaattctcttgcctcagcctccagagtagctgggactacaggtgcccaccaccacgcccggctaatttttgtatttttagtagagacagggtttcgccatgttgaccgggatggtcttgatctcttgactccatgatccatccgcctcggcctcccaaagtgctgggattataggcatgagccactgtgcccggccatttctgtctttttctttgcataaccaaaccaaagctagtaaacgtggatggcattgaacagcattggatcaacattccagacatggaacactcctgggtagtatcatccaacagtcaagaaaggtctggacttcacagcggggctgacgggagtttctgcctactgagtcttgcttgtactcagtggactgtgcagaccattaactacagcaatgattctggcgaggggaggctacgccaccgaggtctgcagagctgtaagttacagagctagggttggccatgctgttgaacagagtgatacatctacacccctcttagtacagttcatggtcaagctcaaatcaaaaccaaagagcaggcgaggcaacatagggaaaccgtctctacgaaaaatgaaaatttttaaaaattagccaggcatgatggtacgtgtctgcagtcccagctactctggaggctgagatagaagggtcccttgagctgggaggttgaggctgcagtgaactatgattgcaccgctgcattccagcctgggtgacagagcaagaccctgactcaaaacaaaacaaaagaaaaaatggagacagtgagggaaggtcactcacacttggttcacatgagttacaagtattctgcaaggtgagaggctaagaactgagactactggactgtgggcagaatgcgggcactggagacaggcagaggcagctgtgtttggcctgagtctgccacttacgctgagttatgagtcactcgggctgctgtggcaaagcaccacaaaacaggctgcttaaaccgcagacatttattgtctcccattctggaagccataagtctgagatcaagatgtctgcagggctggttcctctggaggcctctcttcctggcttgcagacggccaccttctctgtgtccccaggtggttgtccctctgtgtgtgtctgcgtcctcacctcctcttctcataaggactccagtccgatgggatcagggcccactctaacaacttcatttaacttgattgcctctgtaaagacccaatctccaaataaagtctcattctgaggtcctgggctatgacttcattcaatatagaaattttggtgggggagagacttagcccacaacactgaatgaccatggggcgagtctctgcaacctaccaagggccaccacctgcctgtgttgggacacgtccgcactgctgagtaagacacataaacaatggtggagcagcaaaccagcgccgaaaagtatccggcctgccagggtcacaggagcttcttgggcaaggctgttttgatttacagcaatgtagcaagaagagtttcctgtgagagactaaattgctttccaaatctgttttgggccctgtaaaatggcgatgatgacgggtgattttggaagattgtagtgagggcaaggaagtgtctagacaaagcttgagaaaatggtaaatattataccatataaaataggtcttattgccatgggttatctgaaagctgtggaaagggccatctacaacatgaggcttggattacacagatggattcagggacctccacctctacggcatctgctaactcaccttcctcaggtgagacttacatccaccttcctcttgacttctacccaaggagcccaggaaaagccaagagaacaagggggaggaaatgccagagcatctcaggtcgtggccccacagggatattccctattcaggatctggagccagaaacgcagaccccggggacgatcaagatgccagctctgcaaacgcatgtaagcagcgttcagcaagaacttaggaaagccggaaaaaactccaagtttctgagcacgtcattcattacaaagaagcgcatttcacattcagaatttcctctgcagctacggtttctgtcatcatcaagttctgcatgatgcatttttaaggacccgtcataaacacaagcttggcaggggccacggaaaggtgcgcgcaggcgtcttcgggtctttgatagctgttcacgtgcaatccgtgtacttgcacacctccaacaaataaccaacatcaaggtcaccccaaactacaattggtttattcccaaatgcaattatccaaatgaaataatacttcttactgcggacagaggcccattgggctggtgctcgtggtggcaaacactaaaaccccggcacgggtaacacacgaagctgaaatcagacatgtcaatggaacagggaaatgtggggtgacctcgactcagaaggacagcctagtcggggggtgctgaggtccaagagtcaggcttagtgcttctgcatgtttaaacgccaataaagggtaacggagctgtggattcgtttttccaatcagaacatttttcgcacagtgaaagcttcatggcagccgctggatgctgtggcgaagcggtgggcagactgtatctccaggcgattagtaagaggctgcctgtctgtctctgctattgtcaaggtgatgctaaactgggagacactgcttggttctgccagtggtccatggactccttgggggtgacttaatcttcctcttttcatagccatgatttcaggcagagccattgtaaagcagagatcagatgctggccagagaagtccctttagaagcaataaattgaagtgaagtaagtcagccatggaaggggggttataattaaaaagtcctgactgcagacacaaaacacttactatgtgcccatagcctggctcgtaagcatgttaaacacatcatctcttccttatgttctccgggaggccgcattagcacccccaggcccaaagaggaatgctccaaaaatgccagatcattcccagagccacacagctgcaagaggaggagcagggattaagggggtccccgaggccgagctaatgagtccaactcgatcctggcagcacacagacggagccatgagtcaggaagattaagccagcaggaggtcagaaagtggattagcgacgaggccacagaggcaggtgaggctgctgccgggacgcagatgctgctcagaagctgtggtgtgggaggccttgtccgcccagaagggagagcagcgagggaagggtggaggctggcggggaggcagagtcggagccaggctggaggaatcgcccaggtccaacctcagagcaaagatgctggaaaaaagcctcacccttggatttaacacagaaaagtaaaaactgatgatctgcggccctggtattgccaccctctggataagccttaccagcttgggatgccagcaaagaggggacggctgctcctcaccagcatggccccaaaccacaatactccccctacactgtgggatttacagagctttgctacagaacttgtagtaattccagaccaaagtcacttttcccgtacattgttttctccatgagatttaagtaggcattaactctaagccaacgatgaagagcacctcaagtcaagacgttttatgtgcaggctacggagaccctgcaaactgggccaatctctcccatatacaaagcacgaacccaatacgtaacagaggaagggtccacatataatccttacaatatttgctttaaatgacgtgtaagaaaacaaagtccttctctgcctttatcgaggatgccctgtgacgtgaataataaccaatatgatcaaggcttgactttccatggcaactttcattggaaggccccacagccttccctttttttctaaacaatttgtaactcaccagtttcttgactaaaatagtcaagtgtaaaccactcctcttaaggacaggtaggctagttttcattgttgtattacagagacagtggaggcagagggaaggctgaggggctggggagcagcactctctttggtcttagcaaccagttaatgaaaccacaatcagattccatgccttctacctccccaagaggtaatccaaatgcatactacaaaggacatggcggggctactcaaagtggagaccaaagatcctaaccatgtatttctataatcaagagaatggatagatgggtgaatgagtggatggagggagggagggaggggtgaggtgggtaggaggatgagtggatgcatggatgggtggctgggtaggtgggtggctgggtggatgcacagatgaatggatggatggatggatggatggatggatggatggatggatggccggccggacggctggctggctggctggctggctggctgggtaggtgggtggctgggaggatgcatggctggctggctggctggctgggtaggtgggtggctgggtggatgcacagatggagggaaggatggatggacagatggagggagggagggagggacggacggacagacggagggagggagggagagagagacagagggatggacggacggatggatggcaggcagacaggcaggcaggctggctggctggatggatagatagacggatgagtgagtggaggggggatgtggatggattggagggtcaggggatgggtgggtaggtgggtggaagcgtagagtggaggggtggtctagggggcctccctggttaggctggagtcagtgttgggccacactccatggactcaaagtttttgaataaagaccattatcatgttaccatcttctgcccaagtcctttttgatgacttttcttttagggcagaaaatgtgctcatgtcaaggcaacatatacctaaacttctaattaagtctataatcccagaagaatttcatttagctaacaagcaactgggagagaacattctggaacaaaacatctgaaactgaaagggcagcccaaaggaaaactatgtattttttttttttttttagggaaggggtctcattacgttgcccaggtgatccccctgcctgagccttctgagtagctgggattacagttgtgcaccactgcacccggctacattcgtggataaaagagcttttacctttctcggtggactgggtgacttgacagtgcagaaagctcctccgtggcaggaggcccggagtgggcactggacacagcacaggtgggaggggaggggctcatctccagcaggagaggcaaagaactgagacaaggcttccctctcagtccacgtgcggtgccaccccatcactgacgatggccagagcaggcatctggggaggggagagggggaaaggggaagtgactgccaacaggggtggggtttcctcttggggggatggaagcttcctgagattcacagtggtgatgggctcactcatccgtgaatttcctaaaatccaacgacttgcacacttccaatgggtgaattatatggcatgtatattacatctcaattttttttttttttttttgagacggagtcttgctctgtcgcccaggctggagtacagtggcacgatctcggctcactgcaacctccacctcccaggttcaagcaattctcctgcctcagcctcctgagtagctgggattataggcgtgcatcaccacacctggctaatttttgtatctttagtagagatggagtttcaccatgttggccaggctggtcacaaactcttgacctcaaatactccacccgcctcggcctcccaaagtgctgggattacaggcatgagctgagaaactgcaaagacgcaggcctcacatcttaaaccctctctccaggacagccccactggctttgtcatagggaagcgtctgtgggtctccagctttccctgcacttcccagggtcccagcctccagcaccatttacctggagcccccatctcttctaatccttctcctctcaccagagaggccaagattacccttttcaaatataaacgatgtcacatgctctgtaccaaacctctgcccatcaaatacaaccatggcctccttgtcatgaccctatacctggacgcccaccgcccacctctgctgcctcacacacactgctcccgcagccctcagccttctctgctgagccaacacaccaagtttgtgcatacctcaggctggctgtccctgaagaccctcaccctagaagattccaagcaaagaccctctcccatcctctgaggctctgtacagccattggcgcctcaccccacagaggcaagggtttaaatgaattcactcactccatagccagatacccagcattcactcggttgtaccggctgatggggtacaaggatgagcagagcctgcactaggtgtccttgtggagcggaattgctgcccagctgccccccaggcgcttagctgtgaaatccccctgtaaacaaagagaccgaggagaagccatggagccatggaatcctcaggaaaaagaatccactgacttgcacacttccaataggtgtgtgcccagactaggggggatatgtttttttttttttttttttttgagatggagtctcacttttgtcacccaggctggagtgcaatggcacaatctcagctcactgcaacctccacctcccaggttcaagcaattctcgtgcctcagccaccacacccaggtaatgtttgtattttcagtaaagatggggtttcaccatgttggccaggctggtctcggactcctgacctcaggtgatccacctgcctcagcctcccaaagtgctgggattacaggcatgagccaccgtgcccagccggggaggacctgatttttatcctcagaccgggaagaagtcacaggagggctgggctcagcggtggccacggtgttcacatgtacacaaccacccaaggcctcacctagagaacttctgacagtctggtctgaagctgttctggttgcccaagaggaagatgacaggaaaggtggggtggtgatgaaggctgagggaacaacacaggcttgcgggggtctagaaggtacagtgaccagacttagggagggactggctataggagctgtagagatggaagctcaggaggacgcctacattctggttgcgacggctgaatcaaagatggtccccacggcgaaaaagtggaaagaatccagctgaccattgagtgggaatggatccacaagatgtggtccctccatgcaagatgatgagaatcagaacaaggctcaacagggctctgctaaacgccaccctggggatggacctcaaagctgtcatgcttcagcctcagggtccaccaagactggatcaaggaaacgtggtgcatatgtgcaacggaatactactcagccataaaaaaggagagcatgtcttttgcagcaacagggatggaactggagaccattatcttacatgaaaggacttggaaactgaaactcaaatcctgaatgttctcacttataagtggaagctaaataatgtgtgtgcaggaatgcagagcgtggaatgatggacacaggagactcagaagggtggtggggggtgagaaattacttaatagatacaaagtacatcattcaggtgacggtcacacgaaaagcccacactttacctctatgcaacattcccatgtaataaaactgcatttgtacccactgaatttatacccaaaaaagctgattatgctgagtcaaagaaatcaggcacagaaggccacatgttgtttgactccatgtctggaataagcaaatccacacagacagaaagtggcttcctggtcgtcaggggctggaagtgggggtggggatccactgcaacccagcataagggatggaaacctcccacaccaggatggtggtgacaggtgcacaactcagcaaatccactaggaatcatcaaatggtattcttttttattttttgagatggagttttgctcttgttgcccaggctacagtgcagtggcgcgatctccactcactgcaacctccacctcgcaggttcaagggattctcctgcctcagcctcctgagtagctgggattacaggcatgcgccaccatgcccagctaatttttgtatttttagtagagactggatttcacaatgttggccaggctggtctcaaactcctgacctcaggtgatccacccacctcagcctcccacagtgctgggattacaggtgtgagccactgtgcatagccctgaattgtattcttaaagtaagtaaatcctataatttataaattataactcaagaaaactttttgaaaaaaagaaagttttagtcttttctttttttttaaatccttttttaaaataagtattaaaatccttacttaaaaaaaaaaaaaaaaaaaaggtaactgctatctaagagagcaaataacagtggggccagacctggaggttcctagagaaagttacggtcatagcattggttttgcacaacttgagttgaggggcatctgggctttcaacagagaaggtatggagggggaaataaggcccagcccccccaaaggaggctgcagcaggagatgtgaccgtggatgctgtgtgaatggaaattctatcgccgccagggtgctgggtgcagggagccgctaacagaagttctatcggtgccagggtgctggctgcagggagctgggcctggccgagaagccctcccgccacccactccctggaaggcccaggtgttgaacagaatgcagcagaaggcaaatctgaccagaactggctttctacctggaaaaatccacccgagggaaacaaggacaaaccttcttgaagtggaattaagaggctgccattcaggatcacgaccacccaagctgccaatctctcaggcacatggactccatcaactcctagaagacacccagctctcaccttgcagggtccaggagcaaggaatcagacacacacacagcaaagcatcgaaacgcagcttctaacggtaacgaaccacccctgcaccagccgcccagagccctctctcacaatgggcgggcgcacacacacagcaaagcacccgaatgcagcttctaatggtaacgaaccacactcctgcaccagccgcccagagccctctctcacaatgggtgggcgcacacatacagcaaagcacccgaacacagcttctaacagtaacgaaccacacccctgcaccagccgcccagagccctctctcacaatgggcgggcgcactcacacagcaaagcacctgaacacagcttctaacggtaactaaccacccctgcaccggccgtccagagccccctctcacaatggccgggcgcctcatggtctctgaggatgaggagccagccccaggtacaggaggggaagataggctcagacgttgccagcacaggtagagtcctcccaatattcaaaagtagaggaatcctcaaatacaaaatgcaaatgcggtaattatgtgcctgtgaccaaaaagaggggattaaatcctgaaggtggaggaggtgaaacctccttacttttggggttctattttaatccacaataataagcagacgggccaaggccactttggaatcaagcatatccggccgggcgcggtggttcacgcctgtaatcccagcactttgggaggctgaggtgggaggatcacttgagcccaggagttcgaaacctctctggacaatatagtgagactctgtctctactaaaaagaaaaaaaaatcccagtgtggtggcgtgcacttgggaagctgaagcaggaagatcccttgagccaagggtgcagtgagttgtgattgcaccactgaactccagcctgagtgacagagcaagaccctatctcaaaaaaaaaaaaaaaaagaaaagaaaaagaaaaagaaaaagaaaaatctgagagtccatttggaagcagcagacagacgagaggacatccccgtcagcagatgcatgccacagggtgaggcagcacagcgggaatgagagggcagggccctcccagcatggcaaaggtagtggggattttgagtgactgtacaggcggggagagagggaggacagctgagtgacaatgcatggtctttgagggggtcaggttggcagtgcaaatgctttttcctaaatgaagtaccccactggaagatgcacgtgctttataaatggaagcactgactcaagcacagaatgggacactcattttccctgagcgtctgctgggaggtgggccaggtcgcaaggatcagccctcagagtgacagcttcagctgagctactcggtgccaggcctcagggagaggcggatgcggggccgacgtagacaccccagcagagcccgacaaaggccgccacagccccgttctattttcttctctgctctccttgcaacatggcattcactgtggattaaaggggtagggggaggggggagggatagcattagaagatataccttatgttaaatgatgagttaatgggtgcagcacagcaacatggcacatgtatacatatgtaactaacctgcacattgtgcacatggaccctaaaacttaaagtataataataataaaataaaataaataaataaataaaagaaaaaccactttgggccacggggccagttttcttccctcttcctcattcacactcccccagaaataacagagctcaccagtttgtattgattttggcacatgccacttgttttaaaggccatgctgaatgtccagagccagcactccaccactgtgcatttgagaggatgcagagaggctgccctccctgtgcccagagcccaccccaccactccctgcgtggcccgggaagcccacccacacacgactattcaagtgagggctccggttgtgcctgaagggttgtgagcactgctagaggctctcactcaatgacttaaagcttcagttccactggagggtgaggctcagaaacagcactcactcggccagcagcagtgggcccggacagcagcggaggaggggtggcattgggggagaaaaggggccgcccaggtgcttctccagcaccaactcccagtggacgggcactggggcctcggtgcagactcactcggcagctcctggctggctcctccgggcagggttccaggaactgtctcgtgtccctggctccacagaggactcagccccacaagggatttctcacacgggaacaatgtctgctttgttgctgagagctcacacccgggggatttctggtttcagcctccaggggctttgtttgtcttgaacagagtgaagcaaagtggtcttcagaaggttccagaaacaaccaggctcccacgagtagagactaaaccctgaagaggccctggctttcacgaggaggtgctgtaggttaaatctgggctggagcagacctgtggctccatccatcactccaacaggtctccagtgactctagcaaagtgggcagaacacctgctggggaaacagcccctgccctgcaaggggaagattaccctgccaaggaaagcgtcaaacaggcagggaggcagggtccggccgggtgtagaaggcccctgatctcccaacacccttgccccagtgccgatggaggacctcagtggctgagatgaccggggcctcccttctacgtggctgatgagagcctccgagtgtgggtagcaccagcaggagggtggacccaggagaacagaaacagtaatgggccccttgtggctgctccccgggctgaacgccaacccgcaatggctcacttcacaagtggtgtttgttcccgacaggtggaaccccgaggctcagatcttcagaccctcgcccaaaagtgtagagtgaatggcgagggagacgtgcttctgactcatgccaggacgactggggccggggctgcttcccacgcagcgctgcctgctggctgccttcctgccgggaattcaacttgcaggtgcaaatcagcccagtaccaagcagttggtggcacacccaacgccagcctcccagggcttccatccagcaggtttcaaggcccaaggctgggtgtccccaggacagtggctctgcccctcactggctctgaagtctgaccctcctgttcccatctgtaaagtgggattaagcataaaccctccccatgagtaggagggagcagtggggctcccggggctggctggcgtcctacgccttcctccacctgcaggttacatgctgcgttccgtttgagtgtacgggacacatgccctgtggacgggtgtgttatccttcaacaaagatgctcacagtgctgtctacctcaaggctgacagcagtttgggagatcgaggtgggcagatcacctgaggtcaggcgttcgagaccagcctggccaacatggtgaaaccccctctctactaaaaatacaaaaaaaaaaaaattatctgggtgtcatggtgggtaactgtaatcccagctactcaggaggctgaggcaggagaatttcttgaatctgggaggcaagagacagaggttgctgtgaggtgagatggcgccattgcactccagcctgggcaagagagcgagactctttctcaaacaaacaaacaacaacaagaagatgtgactttgctcctcctccaacttccaccataattgtgaggcctccccagccatgtggaactgtgagtctattaaacctgttttttattacaaattactcagtctccggtagttagcagcgtcgttattaccagcatgagaatgggctaatacaatgtctcaggaaagacagggattccaggccctgcacgtagactccactctcccagccctgggcctgctcctctccaaaggcaaacagatggccaaatctaacttcatgatggagccaaacggaattcacccatgcactatgcgaaccaacagaaagcccaaactactgacagccaacctagacgagacaggcagaaatgtcagggaagccacagggaccccgcacagacacaaaatgaaccacagcaagaaagacggcatgcaaacctccaacggtctctgagctgcatgaaaactcaccacaattaaaagaagaaaagcccccgagaatgcttgatgccagggaggacaaaaataagacagaaaacctaccaaacaaacaactcaagagagtattttcaaaaagaaagagtgcagggctatggaaacaaaaactcaaaggagcatgactacagtaaattagaaatcacaaaaattagaacgggtctaactgagaacacaacaattaaaagctcaagaaaatcatggcaggccgggcgcggtggctcacgcctatgtaatcccagcactttgggaggccgagacgggcagatcacctgaggtcaggagttggacaccagcctggccaacatggcaaaacactgtctctactaaaaatacaaaaattagccaggcgtggtggcgcatgcctataatcccagctactcaggaggctgagggagaagaatcacttgaacccaggaggcagaggttgcagtgagctgagattgcaccactgcactccagcctgggcaacagagcgagactctctttcaataaaaacaaacaaacaaacaaaaaaaaatggcaaacaagcagaaaaatgccaagcaattaaagcaattagagaaaaagataacagatatgaacaaggaaaatccagtataggaattattactatccctgaaataaaggatccaaccgataacacagaaaaagtaacaaaatacaggaaaacattcttaaaatgaaaatgtccttaaacagaatctgcagagagaaagtttttctaggaaaaaccaagaatgcccaacaccaaacacttcctggtgtagcaacggaagccacttctttaggaatctagtccaaaaaaaaaaaaaagtcacctatgagatggaaaaaataaatctgttggcctcaaatgtattcaaagcaatgttcagggcaggaagacaatcaaacaacatccccacagacgggaaattgtgactcaaaaatacagagcaggtcaggcacagtggctcaggcctgtaatcccagcactttgggaggccgaggcaggtggttcacctgaggtcaggagttcaagaccaggctgggcaacatggtaaaaccccgtctctactaaaaatacaaaaaattagccgggcatggcggcaggcgcctgaaatcccagcaacttgggaggttgtggtagaagaatcacttgaacctgggaggtggaggttgcagtaagaagaaatcacgccactgcacaccagcctgggtgacagggtgagactccatctcaaaaaacaaacaaacaaacaaacaaaaaacccacagaggaaaagagttttcaagctggagggaacaagctgacattttcaaaacacagccaatcctcactattcatgaattttgtattggggtatgcctacttgctaaaatttatttgtaaccccaaaatccatgcttttcgcacaaaacagccaaaggtttcagcctgcccgatgcgcgggttcccacgggaggttgatcaaggtggtggtccgacttcttgtctcagctctcatcttgtaaacaagcgtctgactgcagcccatggaatgtcattctcacattgcttgtgctttttgttggtgattttgccatttaagaggggtcccagcaaagggctgaagtgctgcctacttgttcctaaggcaagaaggttgtgatgagcttcacagagaaaacatgccacagaagctccactgaggcctgcctgagagcactgttggctgtgagttccatgttaacgaatcaacattacatagtaaatatggcatctttaaacagcaacatacataaagtaagattccgtattgacctatggtcaaacatgtgaccaggggcttgtaggaatcgaacactgcacttcctctgggagcaatggccaaggcgtcactcattcagcatctgtggcaactttttagaacacaagtaccaccgataacgagcatcgaccatccattcaccgagaaagcactgctcttaggaactcttgctaaaaaaaacccactgaacagtgaattccctccaattaaaagcaaaataacaaccagaaaaggatctggcaaatgaaaagggcattgcaaaggcaaatgatggcagtgaccccggcaagagagacagagtggctccgggccctggaggcacagtggatagtaagtgggagggacagtgacagtgtgaaacaagtcactgtccacacccaacaaggctcaggaggtgggggagggaaagtgtgcgcatgcgtgcacccatgcacacataactagctactcattcaccaaactgatgcccttttcttcctgggctcagacctccactgcgtttcccagcctactctgcagtcaggtgcaacctcctcatgaaaccagggaaggtgatggatgcactttacaagttctgtctcttcctccctcatcttctgggcagatacagaggaccccgtggaggattccagagctccagggaatggtccagctatctaatggaaagagcctgggtacctgaatgtctgtatggatcagaacttccctcctgtccatcctgccaacccaggtggactgagaagagagaaaaaaaataaagcatctatgtgttaagtgcctgacatttggaggccttttattatagcaatgagcttagtttacccctaaatgatataggaagaggggacagtgaaaagggaaaaaaaactgtaacaagaaagaaaaaaaattccagccttccagtgtttcataatcacttcttttaccttcacagatttagctggaaaaagtctcttgtgacaaaaataaataaataaaagaagcatttccttcaccatctttttctcctcttatattcaaataaaataacattgatgatgctcatttcttaagagcgtgtgtggtttgagcccacgcttaccaaggtatttctatccatatgcacttccacccactgcctgtaatcctgcagagggacgtgtcggaacagggctctgccaagtattgatgtgatcaccattgctaagtctggcatttgtgctttcctgcattacttgaacttttcataacaatcatttatagcttttataagaggcattaaataatataggagaaggaactccaaaagaccacgcctatcctcctgaacagcctttgtactaccagggaagcccctggggccagtggcatggccagattagctctagggcatcaggccaccctgagcctcccccacaacgggtgtctaatcttttggcttctctgggccacactggaagaagaaccgtcttgcgctacacataaaatacactaacactaaagagagataatgagctaaaaagaaaaaaaaagttgcataaaaacccctcagaatgttttaagagagtttatgcatttgtgttgagccgcattcaaagctgtcctgggctgcatgtggcccacgggccttgggttggacaagtttgtcctagacggtgaagccacttggctgagttcatccctagagggcacgtgtcagcacgttagtcccctcagcccagttagcgtctctctcagagggagcagggctgggggtgggctgagcagagggtgcctgctggaccgcaagctgctggcactgggggaagaggagacacacatttagccctcgctggggaccaagccctgagaggtgctaaccccagggcatctcttagctcctccacagcaccaggagctgggaccctggatgggcaccaagtgaggcaccagcaacactcagccagtaggcagcatgatgcttccccgatctccagcacttgggccccccttccccatcgtggctggggccgggagactgtactcatagaggtcggggtggatgcagagcactgggcttaccccctcaagcacctgcagcagcctacaccaccagcccacctctccccattcctttaacccaaagctaaaatgagaagggtcctcccagcccactgagggagacccttctagaaagcacagatggagactgtgacgagcctcacccagatgcccctctgagtcctaactcttggatgtctaccatgtctactccacagcaaatgggcttcgtaccaactgcccctactactgccacccccacccacattccccaggtggacagacggcgtgtgaaatgttcgcaggccaaccctactaggcgcctgtttgcaaccattatgtctgctccacgcttccagctctgtcccacatctccgatttgaggccacatgtggcacagtccccgccgtgagcaagagggaacgtggctgggcgactggcccccagcttgctctggtggattcaggcaaaagatgaagccacaccccttcctctgcacacgaagctcccctttacagacaagatgaagccacaccccttcctctgcacacgaagctcccctttacagacaagatgaagccacaccccttcctctgcacacgaagctcccctttacagacagccccagttcccaggggccaacctcctcggggaaggcaaatccaacaaaagggacccccaggcataaggacagacatccaggacacagccagcgtgggccagggcagcctgagggctctgggcggcacaggaatgacattaggcccagggctggagggacaggaggaggcggacagcagccacgcgggaaggagtgctcagggctgtaccccctggaagtgggggagcatgggatgctgggcctctggcacagcagagtccggcaccaggaagaggcagggccaggcctgagagcctcctgcacttggtgctagaagccagttgcgggtgcacctgccgcccgggttttctctatgaggctgtgaaacactcctctccacctctgggactcttgcttcaggtctggcacacagtaggtgcccagtcaatgtttgtggatggagttggggacaatgacagcaacagcatgatgtgaggccagcggcagcagggaggggaggcgggcacggcagggagcctggggggacgggggcagaagtatggagcgaggaaggagcacggtgtgcccagagcagtcaggaccgtgggtccggggaggaccagagcaggcctctggcgttcaagccacaggtgacattgtccagatgtgaaccaaagggcagaccacggggctcaccgtctgctgcaggtcatggatgaccacgcggatcaccagcgtgttgccctggctctcctccgtcctggcaccgcccggcttctccgcagtggcccggatcgtgtcatagatggtctcttctttggagctgtctgactccgaccccacggagtagtcggagaagctctgggccatctcgtcctcgctggatgttgggctgcgcggcatggctgcctgtgtcttcgaggtggggagaaggaagacaaagaacgggagatgtgaaaatgaaagaaaacccaggggcacggtggacactggcgctggaacacacgtgggctcggtttcacagtctgtgtttgttggtgtgaccaccagccgagggccccaggtatgcacaatgtacagatcccagagggcggacacaagtcggcaccgcctgctcctccctggagcttgagccagaggcggcagccaggacccaggaaaaccctgcaaactctggtaccagcgctgtgaaaccccggcactcaaaaggagcctgagctagccacggggatgaccacagcttacaaagatgatgcagagggccactggggctgtctgagctacccaaggtaagaaaaaaggctgccttttgttttccttggaggacagagcttcaggagaggaagaaacatgggcttcaggtcagaatggcagcaagttcacgctataataaccctctctgcttcaaacacagagcaatgataggtaccgtgtaaaaacagaacaaaaggccagggccaggcccacagatgagagaatctcccagaccaggactggagtggaaccaagagtcatgagcagactgcagccatcagacttgggggtccccaagaggcaggggcagctgagagtgcagcttcctcaaggtcaagtgcaataaaaattaccccacaaagagtcaggccaggttgccaatggccaccttagaccaaggcttcttgtttttttttttttttttgagatggagtttcactcttgtcgcccaggctggagtgcaatggcgtgatctcggctcaccgcaacctccgcctcccgggttcagacgattctcctgcctcagcctcccaagtagctgggattgcaggcatgcgccactacacccagctaattttgtatctttagtagagacagggtttctccatgttggtcaggctggtctcaaactcccaacctcaggtgatccacccgccttggcctcccaaagtactgggattacaggtgtgagccaccgtgcctggccagaccaaggctcttaagaaggacacagaactctgggaacagccatccactatttggtggctgcatctatgacatcccccacctctgcagggcaggagtacagaaagggttggataaaagttggcttgacccagggatggcagggactgggggaggaggggccatgctgaaccagcaattccacttctgggtgcgttctgtggggaaggacgaggccacgtgcatatggaaaggcatagaagattgttccctgccaaagcagcatgtggaaatgcatggtcaccctgattgtttagggaccccttgatcaagctgtggtctcttcattcccatgaactccacagctgtgacaatgaatgaacccaagctacatgtggatgatccctgaaacataacactgtgcaaaaggaaggcaattcacggaaggattcaaaccacatactatcatttccagataaaggctggaaagatgccacacagtcctacagatggtacatgggcattttcaccgtgcgtaacggcacagaagcagtcaactggaaaggcacatgcccaatgcaggagagcagttccctctcggaggaagacagggtgggccgcgctgcttggagccatgaacttcctgaaagcaattccagcaactacaggacaaggtcaaacttggtacagttggggacacagatgtttgccgtattattctctttgttagaaatcattcacaaggagcaaggaaggagggcaggagtgcagggggcagaagaggccaccccaaaatatgctgcctgggcataaggacagtcctgagctgaagacgatggaggaaaagcaggtgcgagaacagctcgctgccttcccccgccactggtgtgcctcaaagcaagacgtaaatttcagaagttcatcactagagacagctttagacccttgtcagccccgccctggaggaacctacagagctgacttcaccaacagactagccttcagctgctgtttctttcctaaagattggccgccccataatttgccctctagaaactcacagtcctttccctttgtcttgtcgcttctctacaaatgtactgttcctgctctgaggcaccaacccagcccaagctgtaggcactttttcagacactcttcactgacgggtgctctatgtgttcacaaaccatttttctcttgcgactgtcttatgtcagctcaatttcagggccccaggtagagaggagggtagtaggaaaagaaatttctcctctgcagggggagggattagaggaaaggaaggaggggagggaggtggataaatgaatggatggatggatagatggctcactgtgtggatacgcaagagggaggaaggaagggaggaggggagggaaggaggtagatggatggatggatgaatggatggatggctaactgtgcataggtgagagggaggaaagaagggagggaaggagaaaggagggagggagggaaggaaagaaggaaggtgagaaggaaagaaggaaggaaaaaagggaggaaggtaagaagggagggagggagaggaggggaggggaaggagggagaggaggggaggggagagacagagagggagagggagaggaatggagaggaagggagaggaagggagggagggagaggaaaggagggagggagaggaaaggagggagggagaggaaaggagggagggagaggaaggaagggagggagaggaaggaagggagggagggagaagggagggaaggggaaggagggagagggagggagggaaggagagggagggagggagagggagggagggaaggagagggagggaaggagagggagggagggagagggagggagggaaggaaggagggagggaaggagggagggagagggagggagaggaagggagggagggagggagaaggaagagggagggacagggagggacagggagggagagggagggacagggagggagggagggagagggagggacaaggagggagggagagggagggacagggagggacagggagggaggaagggagggaaaggaaggaaatgataagaaggaaagctgagaagacttcctaatgcaggacctaagtctgctgccaattattcacattagtggaatgtcagggtaacaatgacattgataatcccaaatcaatagtttaatcttctatttagtctctagctataaaccaaaatatatttactgtgcaccaattatacatgagggatccccctagggtgtgtgtggcttcatgtccagcgcatgttctttctttgtaagaaaggcgccatgccatggtccacagttttcggagcaccctgtgtccaaccacctaacacaatccctgcatggatatcctggggactctcggctgcgtggagtgggtgggggcaggaacttctcaccctgtgtttagacacttcacaaggcacagatgacagcacgagccaagaaaagggggcacctgtttcttaccctcgagttcctaaaatgagaatgggctttataagaatcctgaacttaggagttttcacacaacatctggatttcagtcatctctagaaaaatcacaggctcccgcctcctgagcccactccacccacctggcagccatgtgggcaccgagccgtgtggccctctcaacagggaaagggcgacatgattcacccagccccacctcactatgtcctctgcaccctggaagccactgcccctcaccatccaggtacactgaggctcaccctgcactcagctcacccgccccatcagccctgggccctggcagcagaattgtggaccctgtgctagtgttttataactggggggccctgtgagtgttcaggaacctcccggggaggccacgggcagttcaccaggaaccaacactatgtccaattaggagaaagctgatacccactgttgactcccagcgctcttccggtgtgggaagagcctgccgggtagcggggtgcactggaaccatgtcctcagcaggcactccggcctcacccctcagctttgctgcccagaaacctgacagcagccactcctcatcagatatcaacctccacctgtagctgcgatgccacccccatttcacccgtttttattcttcgtcctcattctcctgggccctgctgggttggaaagcagtgcaggcatgagggtgaagggaaagagcccttcttaagtggagccaaagctactcagagctcatgtcactcattaatgcagaaagaagcctagtgtggtagcgaggccagcctcagcgtcaacatctgaaaaacggagggcggggggagcccgcagctcagagccctggcacagagcagacacggcccacactggttctgccccagctcaggtcagataacgtctgactggcaagagcaggcagagaccgtccaggctccaagctgcttccaggggtgcatgtgtaggaagccccccctcagtggacagtgggcacccagtgaacacacgctgggtgggaggccagggctcccgatcgcagacgcccacaagagcagtcaggggggcacgaagggggcgatgctggcagaatgtggtccccaaatcagccaggcagcagcattcccactctggccacagctggtaggtaggaacgcaggtctggtgttgccaggcctgcagatatcttttagatatgtcagatttgacaaaaaaaacgtgaaatttataaacattggaaattcactttgtttgttttttattgagacggagtctcactctgtcgcccaggccagagtgcaggggtgcaatctcggctcactgcaacctccgcctcccaggttcaagtcattctcctgcctcagcctcccaattagctgggattacagatacctgccaccatgccttgcgaattttttgtatttttagtagagacgggttttcaccatgttggccaggctggtctcaaactcctgacctcaagtgatccacctgcctccacctcccaaagtgttgggattacaggcgtgagccaccgcgcctggccagaaattcactgtttttaacggattactttgcaggccacatagtacacatctacagctggacctgagtccaggaacaaaaccaacagcccacagcaggaagggcggcaaggaggggctcctgaggccacagcccccgctgctgccggcggacatcttcaccccctaggactcctgtgtccccttggtaccggctctgggggtgatggtcacaaacaggcacatctgctcccaaaccatggtgcagaagggctccagtgctgggtctgaagaggaaccgggatttcgtgcagaagcaggtgagcagagaggaggagaaggctgggtcacacctcccgggctctttccagaactatcctgggagctcatggccagagatctgactgggagggtcttgaccttggtaagggtcttgagtaacctgattagcagcttcctgggaacagcagacacctgatcactgcctgggaaaacatttaattattaactcccggggagagccaccaggcaaggcagaaggcgcaagtcccatctgcatttcagacaaacaacaaagacactttactgcatgtcccaaataattgcgtgggacattcttatactaaaaaactctctgctgttcatctgaaattcaggcagaactggatgcgctgcgttttatctggcaacaccatgggagagccaggggggctgggctgagttctctaaccccgtgaggaccagcacgccgggaggctccgcagagagaatgaaagcaaagccgaagacgcaatctgaaatcctggcttccccaggaaaagccagtgccagatcagaggaggggaaggttactcaccaccccggggcaaccgttttctgtgtaactaatctctcgggcgggtcgggggcgggggagaggccataaaaccccaggtccatgaacttcaatgactcttagtgtgtgtttctctccttggccctcctagagtagctactaacgaggagaaaagaaaatcatcacagtcaaagcaagttcaacaaaaacagcattttgctgctaacttgctccaagaaaacctaaaatcttcaactggctcattcgtcctccagtacctctgatgaaaaggtagacagacttttccactaattatttcagccactgtgaaaatatgaaagctgacctgggagagaagatacataataaaaacaaacaaaaaacctcacggccagcgctgactttgtcaaggttagagttgcaaaacctttgtaaacacctttaaaactgcaagagttcagccgggtgcagtggctcacgcctgtaatccccgcactttcagaggccaaggtgggtggatcacctgaggtcactcaggagtttgagaccagccggtcaacatggtaaaaccccatctctactaaaaatacaaaaattagccaggtgtggtggtgggcgcctgtaatcccagctacttgggaggctaaggcaggagaatcgcttgaacttgggaggcggagtttgtagtgagccgagatcgtaccactgcactccagcctgggcaacagaatgagactctgtctcaaaaaataaacaacaacaacaaaaaaagtgcaagagtttcctcatctgaactctgatttactttttcaccaaaagaaaagaaggtttttattgatatggaatctctgagagacaccctgtatgtgaatcacatggaaaccgagattttgtgactacacatttcatttattttgtgcattcctgtgtgtaaaatgtgctcggcctcaaggcagtgaggaccccgaggctcccctggtgccgtttacagacatttaaactcggggtcaaacggctgcaggactgacagcactccattggaacctgtggaactagaacagaatattcaaggaatccaggttccatcggatgttagaaaattgccgttctaagagctgacatagacatagggctgagagcaagtgcgagggtgtgggctttggggaagggtgggctgccagccagtccagagttggccagatgtgagggaaggggaggccagccgggcagaagagagaaaggcacgctggcttccttctgttcatttaacccactgttctcctccctgcacctgcaaaacacatcagctgagaaggagctagaacacaacacatgggggccctggccaagggggtggactgctctggaagtttctgcaaaagcagaccttctgacacactgccccaaatactggaggggtgaacttaccccacccacgctcccagagggatggacctaccccagcccacgctcccagaggagggatggacctacccccacccacgctcccagaggagggatggacctacccccgcccacgctcccagagggatggacctacccccgcccatgctcccagaagagggatggacctaccccagcccacgctcccagaggagggatggacctacccccgcccacgctcccagaggagggatggacctacccccgcccacactcccagagggatggacctacccccgcccacgctcccagaggagggatggacctacccccgcccacgctcccagaagagggatggacctaccccagcccacgctcccagaggagggatggacctaccccagcccacgctcccagagaggtggacctaccccagcccacgctcccggaggaggggtggacctaccccagcccacgctcccggaggaggggtggacctaccccagcccacgctcccggaggaggagtggacctaccccagcccaagctcccagaggggtggacctaccccagcccaagctcccagaggggtggacctaccccagcccacgctcccggaggaggagtggacctaccccagcccacgctcccagaggggtggacctaccccagcccaagctcccagaggggtggacctaccccagcccacgctcccagagaggtggacctaccccagcccacgctcccagaggggtggacctacccccgcccacgctcccagaagagggatggacctacccccgcccacgctcccagaggaggggtggacctacccctgcccacgctcccagaggagggatggacctgcccctcccatgcccccagccacaccctcaacatggagacaccaccagcccccagtaactgaagcagaacctggcagggaggtctgaggatcccaccacaccaatgccgggattcagtctagcaccacctcttccagcagtcttgcctagaagctgtcccccaaacccgccctgccccatacccctcaaagctccccagagaggtggcccgtcccacccaccccaagtagagtgactatggccgtggccacacaaaaccacgtggcaaccccatgtcagggctgtgccatctgccacgtagcccccaggcaccagcatggcattagacacactgtgagctgaactgtgtcccctgctcaaatccgtatgtggaagtccgaatccccggggcctggaaaagtgacagtattggagacagggcctttaaaaaggtacttaaggttccacaaggtcttacaggtgggccctaatgcaaggctggtgtctttttatcagaagagggactctggacacacaaggggcacctgggggtgcatgcgcacagagggatgatcacaggaagacacagcaagaaggcagccacgtgcacgccagggagcgagacctcaggaggacccagccctgccacaccttgatcttggacaaacagcctccaggactgtgagaccatcaatgtctgtcgtctagactgccagttctgtggtgctctgtgatggcagcctgagctgactcctccagtccccaggaccctcctgataggtttgtgaaacagatgcatggaacaaacagatttctgaaaagaacctccatctatccaggtttcctgggatttccctaatcaccatcaaacaaacactctgttaccagccctgctggcatctctggatgaactcaagaaacgggatcctgcctctgagtttccgccctccactggtgtcaccgtctcctgtcctgagtttctctccccgttcagccaaatccttccctttcagactcgctctaccccaggtcagaaccaactgcctatggtacacaagctccccttcctctcacctcagagggcctggagtccacgcctaattccacatctaattccttcctaagctgtgcctcctgactccagctctgagaactaattccattacacatacaccctccaaccctcctctggacacatacatttgtgaaatgtaactggatagaacaaaaacacacaggtcattttgctgctgaatttttaagagggctttatatggcagtgtctcagagaaaggggtaaacgcagcatttcccaagtgcacttgccccagacattcttttcccctggggctcataaacaatctcccacaacaggaagagaagctatggtctgagttgcccatagtcccttccttgctacactcaagatcttagaagcaaaagccaatcacatacctacaatgcatggcccactgaggccagcaccctgccaagtattatcgcctgaaagagggatagcattaggagatatacctaatgtaaatgacgagttaatgggtgcagcacaccaacatgacacatgtatacatatgtaacaaacctgcacgttgtgcacatgtaccctagaacttaaagtataataaatatatatatatatacacacacatatatataaagacactgacagcaggaactctgcaatggttctctatctaaaagaaatgggctctagggaaataacggctacttcacaccttcctcttaatgccaaaaccaatatccccaaatcagaaaacaagctactaataaatcagatgcctgaattaaaatgatacgtcacttaagagcactcccttagatgaattgcaatgcctcactggtgtgttctattaagacattggggtgtccaggtcttgagaaggactggtgagatggtacattcattaggtaagtctatttctcttccatgcctcagcattcatgtggaagtgtgccgttttcttggtggcaccagtaaccacaccactaatgtggtctgcaccgtctttctttggccagactcaacacagcctccaacagtctctcagcttctgctagaaaagccagagagaagagtctgtctggctttctaattgggcctcagtgggtttctgtccaggctgctgtaaagagcacatgatttataaagaagtcttcattttatgacaggtttccatttcagttttcttagagcagaattcaaggggttctggccagctagcatgaacccactcttagcctgtttgtgatatgctggcctacccatctcacagttctgccgaaaccattcaccgtgaccaggaagggagcgacttgcccaaggtaaaaggcttcctgggagacaacctacagagaaggaaaccaatcaagacaacaggtcaacaagcccctcctgggacactgcccctgtgtgcagctcttaagtgtgggtccaacaaggccctgtgtccagcaggaacaagaggcccagccacggacagcctggggggacacaaaccacccctagtcatgaccaaagtcttggaaaactgggaatagaagagaatttcccaaactcgaacagagcacctactcaaatcctgtagcaaacatcaaaaataagtaagcgaacagataaccgaatgcattgtttatggactaaaagcagggaaatcattattttcagataatatgcttctgtgaatagaaaatccaagaaaatctagggacaaattaaataatgtgtaaccataaaactagttaaaaaaaagtccagcaaaatgccagataagaatatacaaaagttaagtgaattgttacattagcaataaacaattgaaaaacattcaaaaaacactataataccaccaacaataaccaaagtcaactaaaaaaaaatctaacacaatatgtatgagacctttgtggagaaaagtaatactacatagcattatctttttgaaataaagaaagaattgaaggtagacccaaataaatgaagagctatacaatgatcatggacattaggctttaatatcttcaagatgaaaattctccacaaaatataaacttgatgtaacttctaataaaaccctgataggactgttggtagaacttaacactctgatcttaaagctcaaagaagatggagagccacataaaaccaagataactctggagactaagaggagactcattctaccagatgccaaggcttaccagaaaaagttataatatgaaaacagtatggtattagacaaagacaaatagatggatttaaaaagcacagaaccttaggctgggcttgtaaatatcagactcccatatgtgttgggggaaagagaagaattaataaacctatgaggctgacactagcaggtattcacatggagaagatgagaaatagagccccatgccactccagacacacaaacgcattccagatgcactgactactgtcacgtgaaaagcaacacaacaaatctctagaagaaaaagtaagaggcaatgccttcatgtaaggtccctaagacgggattctggcttctcaataaatgctgctttattgctgtgtaagaagatagcacagacttagtgggttagagcaacagaaatgtgcagcaatgtactctcatcacgctgaggtcagaagtcctaaatgagtttatggggctaaagccaaggtgttgtcagagctggctccttctcaagattctggggaacaatccacttccttgcctttctcgcatgttggtggtgacctgtactctgacactcatggccccttcctccaatttcaaagtgggtcactcctatctcagcttccaccttcacatcaccatctcctcttctgcagccaaatctccctcttaaaaataatgacccttgtgatgacattcagggcccacctggataacccaagataattcctcccatctcaagatccttaacttcatcacatctgcaaagctccttttgccatatgaggtcacacattcagaggtaccagagactagaacctgaatatctttgggggccattaattagccagccacaaatatgttcaattgttatttgctcaataaaacaaggcgagaaaaaaagtgtttctttctacaaggcatcgggtacaaggcatgaagggacagacaaattagacaatgtaaaagttaagacttccatcagacacaacagcaagaagacacctcaggccgggcatggtggctcatgcccgtaatcccaacactttgggaggctgaggtgggtggatcacttgaagtcaggagttcgagaccagcctggccaacatggcaaaaccctgtctctactgaaaatacaaaaaaattagctgggcatggtggtggcacacctgtagtcctggctacttgggaggctgaggcaggagaatcacatgaacccaggagatgaaagttgcagtgagcctagatcgtgccactgcactccagcctgggtggcaggaaaaaaaaaaaaaaaaaaagacacctgaaagggacctttacaacataggacagagcgctgtggaaaatctgggaagaattcctacagggcaaaaaagaaacaattccagatgcaaatgggtacagtccatcgcaggggacacctgaagggctagttggcatgggagaacacatcccaaaggtaccaggaaaacaagcaatgccaaggcccacagtgaaaatgcagtcccaggatggggaagggaatgcaaagtgggactgctccggaggctcctggggactctgtcatccccccttaaagcagccctcaaattctcactgctacgaactgaactgtctccctctaaaattcatatgctaaggccctaacccccaatgtgatggtatttggaggtaggacctttaagaggtaattcaggttatgagaatacaagggtggggtcctgatcccataggactagcatccctataaagaaaggaagaaacatcagagagccagcatgcgtgttcacgtgtggtcatgcattcccatctccctgcaaccaaccatgtgtggacacagtcagaaggtaaccctctgcaagccaggaagcagtccctcaatgggagctgaatcagccagcttcttgatctcagatgtccagcctccagaaaggtgagaaaataaatttctgctaagtcatcctatctattctgttatagcctgagctgcccaagacacccaccttctacaacatcatgtgtaaaacataacagagttgatggggaaaaagttgaggaggccactccaacgtatgccattttgtccccagagccctgcagaaaccaggaaaatccctgctgggttatttcagctccagcaatgacaccttaaatgacagtccacgttggcagccttcatccctgggctgctgagcctcctgagacatgtctgtctccaaagaagatggcttccaatagaaaccagttgcctcaaaactgaaaactaagtttgcagacagccttctttaagaagtttacttttgttaaccagaaataaaattctaagtccaccaccaactgaatggatcccccagctgctctttgccaaaggcattccaaagtaaaactgaaaaactagttcaaggtatgatgggaagtggggattgaacatgcctcattatatctgcctccctttggaattcaggcacaactgaccagcattaacattaaaacaagagatctcaagatggacaaaatggactctttgtagcaataagataccaaattccaacctgactctagtatagcatcacatgatagacagcaggtcctgaaagaaaacaacgtatttttttaccaagatatatttctttgacatattttgaaatggccctgaaaagctgtctcttgtggggaaaatttacactctatagagaatccccttccctttccaagtctcttcctgatccaggagagattaactaagagcctggcatctttttagatctgttaagagacatttaccctctattctccctgaagtctgctacctgtaagcttcttccacataataagaaccttggtctccaaccccttatcttaacccagacattcctttctattgattccaggtctttacataataacaactctttcaaccaattgccaatcagaaaatctctgaatctacctatgacctggaaaccctcccctgactccactttgtgttgtcccacctttttggactgaaccaatgtacaccttacatgtactcattgatgtctgcctataacttctaccccctaaaatgtataaaatcaagctgcaacccaactaccttgggcacatgttctcagacctctgggactataaaatgggccttagtcactcacatttggctcagaataaacctctttaaatattttacagagttgactatttttcattggcattttcttagacacaggaggaaatgtcttcacagtctgtccacaggcagggcagcatcctcaaatctggtagacagtgtggaggctccctaagccattgcaacagcctctccttacactgaatgagacacccctgtagcattttctgctttttgttctggagcatcacatgatctcaatggacacttggtgaattaaccaatgaactggaaacagcttaaatgccactgtcttattctactttttgttgctataacaagataccataggctgggttatttataaagaaaagaagtatatttcttacagctctggatgctgagaaactcaagagcatggtgtggcatctggtgaggaccttcttgctgcatcatgatgtggcaaagggcatcacatggtgagagggtgagatcatgcatgtagctctggtctctcttcctcttctattgaagccataagtcccatcatggggaccccatgctgacgaccttatttaatcccaattacctcccaaaggccccacctccaatcaacagatgaatttggggatcaagcttccaacacatgaaatttgaggaacatgttcaaaccatagcagccaccaacaggaaactaagtaaatgattgtatagtaatatcaggtaaaattatagaacagtgaagacaaatcaagtaacatacgttggcatgtgacagtgaaatggggaaatgtcaattgcaaaagaatagatacatttatctaaacactttcatacatgaattaaaaatatagatggcaatggctatcttcacctatctatagcccaacttcaaaacagtgattactgcttcaaaacagggaaaactgatgagaacaagtggcagttatctcaaaataaataaatatatagtctgggcgtggtggctcacgcctgttatcccagcactttgggaggtcaagacgggcagatcacgaggtcaggagatcaagatcatcctgactaacatggtgaaaccccgtctctactaaaaatacaaaaaaattagccaggtgtggtggcggacgcctgtagtcccagccactcgggaggctgaggcaggagaatggcgtgaacctgggaggtggagcttgcagtgagccgagatcgcgccactgcattccagcctgggcaacagagtgagactctgtctaaaaaaaaaaaaaaaaaaaaaaatacatatatatatatatacagaatagaaacaaatatgcaaatagggcaaaatcttaaaatgtttaatactgatggtgggtatagagtcattattgtgtttgtctacttttctgtgtttataatgtttgtttaatactgatggtgggtatagagtcattattgtgtttgtctacttttctgtgtttataatgtttttcactaaaaataaaaactttagaaattagatgaccatggcacagggtctgcctgtaatggtctttccagtgcaagcccttgataaatcaaatctattcattttggaagctggacagatgtgcttgtggggggatctcagtgggtgagaacacggcaggccgtgctgctgcagggaggcagagctgatgcttcttgagggcttcctgcacatcagcctaccagctaggcctacattttagtatctcttgtcagtcccaggagaatgtgataggagggcattgtgacttccccttatctgatagataaggagccttagaagataagctcctggtccatcacagccagaaagagaggcagctcacactcaatccaaattcaagattctccagacgattttcaaaagatagtttgcttgtgcaaaaaggagctcagtggaaactgccccaaaagattgcagtgtgagctcttagaggagtgaaattcggatcaattcactccccatcctttcacgcaaatcacacaccctcttcaacagggaggctggaggaagacagaaggaagaatgcaaaatatctatacatgcgtgctttttattgtgcacttctaaattaataggctttatttttctagagcaggtttaggtgtataggaaactcagctgatagtacagagagttcccactgatctagttcctagtttgtagtctgtctgctctaacaaacctgttgcacttaggatctaaaaggaaatgtaaaatcaaaatacaaccctcccagatgccagtggtctccaaattttcaggtaccctgtgtttgttcctcagcctccccacagttgacttgggtccatctggagagttctggctcctgggttgtgaatgcaagggaggggtgtggcagtcaagactagccactaaaatcatccccaggtacaagccaagttcttaaaatcccagtacctggcagtggagggctgggggattaactggcctttgaagattaaatatcacagcacattgcatctcagcagtgtctgtctaggcagagaggctttggcattaaacagacccagcaacctaggccactgcagagaagacagaagcatgaccgggttctattccagctccagacccaacaccagagcagccacagaataacccagcgggccccagtgtccccagtgaggggctgaccgcagggtgacccacctaagacacctccaattcacaatggggcctcatgacagctgccgcaccttctaaactatgggttaccagaaactaagttaaattactgtgtctaggaactgggaacatcacacaacaaaatcacacagctctgagacctctatggagcgatgaaatgtcactggtaaacggagatgtgcctgttactaaacatatttagtgtatagatgttcttgtacactaaacagatttcaaatcaagggtaagaactctcgacagctttctgtgccatacccaattccatcaaacgccggcctcaggcatctatctgttgggggcctaggagagacgccaagtccttgagtctgaagggcactttccagtcacctgcttggggacggctatgactccaccatgagtggggctgtggctactccatcctgccatcatctgtaatgacagtatttaagctggaggtgggttcctttaattcctattattccaatgtttgtgggaacccagctgtcctttgcaatccttaactttaattttcttgtcttcattttttttttttttgagatggagtctcactgtgttgcccaggctggagtgcagtggcacgatctcggttcattgcaacctccacctcccgggttcaagtgattctcttgtctcagcctcccaagaagctgggattacaggcatgtgccaccacacccagctaattttgtatttttagtagagacgggggtctcaccatgttggtcaggctggacttgaactcctgatctcaagccatccgcccgccttggcctcccaaagtgctgagattacaggcatgagccaccactcccagccttgtcttgttttcttaagaagaaatatttttcccatctggggcattttaaactattgcgctaacctcatggcgagagaatctcttgcagacctccctgggagctgcccccaggtgtgtgtgcgtgtcctcagtgtatcctgctcctaggacgctatgctgtgcagcagccccacagcctcaaggcccctacagcatgaagaatgaagcccgaacaccaagcgggaaggctgttgtcgcttctctctgcgaagcctggtcaaaccctacagcgagatcattcatcccagaaatcttcctcctgggaacttctcagcccttgagatttggatgccaggggttgccgggggacctggtaatcattcaccttgaaatacccccaagtgaaacaggggctcagccaaggttgagaactggcaacatcttttacgtggtgtagtcatgtaaccttttctcaggagcagagacacgtctcatcctcgggcctccctcctggaacgcttcccggctgatctcacagtccagccccaccaactcctcaggacccagtgtagaccatgtccggggagcaccctccatgagcactctgtcaggaagccatctcctccatcctctgctgagcgtgagtggaggacaactctccaacctcccgcgtgctgcacagacagacgaatgtgagtgtccacacgccccccagcctggaccgacaccaacaagcacacactactgctcgcctggtgtcagcccttcccttgaaggaggctcctggcaaaaaggcagggatgacaggacagactgggggttccacagatcaaaactacacaggccaagcaccaaagcaggtgccgtccaggtactgggtcacctcgcttcaccctctcacggatgtcctggaacaaaaggtctgcaacagatagtctgtgggctgtgccacaaagacgccagagacgggcagacaggacctctgagtgggaagagaatttgagcactggaaggatctaggtaaggacaagccaagaaattaaccggacagctacttctttccagacagcaagaatgcagtgaattctcatacagcaatgcagcacaccccggtattacaagacatgacttttcttggtttaccttccaatccacacgtcttttttttcttttcttttttttttgagatggagtttcgctcttgttgcccaggctgcagtgcagtggcatgatctcggctcattgcaacctccacctcccaaggttcaaacgattctcctgcctcagcctcccgagtagctgggattacaggctcctgccaccacacccggctaatttttgtattttttagtagagacaggatttcaccatgttggccaggctggttatgaactcctgacctcaagtgatctgccctcctcagcctcccaaagtgctgggattacaggcgtgagccaccacaccgggcccacacttcttttttttttttttttaattgatcattcttgggtgtttctcgcagagggggatttggcagggtcacaggacaatagtggagggaaggtcaacagataaacaagtgaacaaaggtctctggttttcctaggcagaggaccctgcggccttccgcagtgtttgtgtccctgggtacttgagattagggagtggtgatgactcttaaggagcatgctgccttcaagcatctgtttaacaaagcacatcttgcactgcccttaatccatttaaccctgagtggacacagcacatgtttcagatagcacagggttgggggtaaggtcacagatcaacaggatcccaaggcagaagaatttttcttagtacagaacaaaatgaaaagtctcccacgtctacctctttctacacagacacggcaaccatccgattctcaatcttttccccacctttcccccctttctattctacaaaaccaccattgtcatcatggcccattctcaatgagctgttgggtacacctcccagacggggtggtggccgggcagaggggctcacttcccagtaggggcggccgggcagaggcgcccctcacctcccggacagggcggctggccgggcggggggctgaccccccccacctccctcccagacggggcggctggccgggcagaggggctcctcacttcccagtaggggcggccgggcagaggcgcccctcacctcccagacagggcggctggccgggcggggggctgacccccccacctccctcccggacggggcggctggccgggcagagggactcctcacttcccagtaggggcggccgggaagaggcgcccctcacttcccggacaggacagctggccgggcggggggctgacccctccacctccctcctggacggagcggctggccgggcagaggggctcctcacttcccagtaggggcggccgggcagaggcgtccctcacctcccggacggggcggctggccgggcggggggctgatccccccacctccctcccggacggggcggccggccaggcagaggggctcctcagttcccagtaggggcggccgggcagaggcgcccctcacctcccggacagggcggctgtccgggcggggggctgacccccctacctccctgccggacgaggtggctgccgggcagagaagctcctcacttcccagacggggtggctgctgggcggaggggctcctcacttctcagacggggcggctgccaggcggaggggctcctcacttctcagacggggcggttgccgggcggaggggctcctcacttctcagacggggcggttgccaggcagagggtctcctcacttctcagacggggtggccgggcagagacgctcctcacatcccgcacggggcggcagggcagaggtgctccccacatctcagacgatgggcggctgggcagagacgctcctcacttcccagatgggatggcggctgggaagaggcactcctcacttcctagatgggatggcggccgggcagagacgctcctcactttccagactgggcagccaggcagaggggctcctcacatcccagacgatgggcggccgggcagagacgctcctcacttcccagacggggtggcggccgggcagaggctgcaatctcggcaccttgggaggccaaggcaggctgctgggaggtgaaggttgtagcgagccgagatcacgccactgcactccagcctgggcaccattgagcacggagtgaacgagactccgtctgcaatcccggcacttcaggatgccgaggctggcggatcactcgcagttaggagctggagaccagcccagccaacacagcgaaaccctgtctccaccaaaaaaatacgaaaaccagtcaggcgtggcggcgcgcgcctgcaatcacaggcagtcagcaggctgaggcaggagaatcaggcagcagtaccgtccagcttcagctcggcatcagagggagaccgtggagagagggagagggagaccatggggagagggagagggagagggcccacacttctaaaagtaatcaatattcacaacagtggcaggtagcatctagggaccatttgacaacactgataaaaggtcaactgaggcagaataagatgcataaagagttagtttgagcaaacagtgatttatgaaatcaggaagtaccaaactgaaggtattcggttggtgcaaaagtaattgtgggttttgccatttctttaaatggcaaaaactgcaattacttttgcagcaacctaacagttttgggctccaccacagggatggaaggggaaagctttatggggtgaacacagacgcaaggcaaaggagacacttggttggttacaatgatgtggtcgccgtactggcttatcccattggaaagtccctagttgaagttaattgacagcttctgattgactaagctcgtgtttcatttttctttaatatagacatttatcagaaatagctcaagttagatttcactcaggtgttgcacatccagcaaggctgaggtcacttatgaagtctgactggctttgcttaggattctttaggcctgttttcctttttaatttaacaatataaaacaattcatgtgactccaaaatatgtatgtacataagtctacacagaatgtgtataaaaccaagctgggtgcggtggctcacgcctataatcctagccactttgggaggccgaggcgggtgaatcacccgaggtcaggagttcaagatcagcctggccaacatggtgaaaccccatgtctactaaaaatataaaaattagccaggtgttgggggaggtgcctataatcccagctactcgggaggctaaggcaggaaaaccgcttgaacccagggtgcagaggttgcagtgagctgagatcgtaccactgcagcagctccaccctgggtgaaagaataagactccatctcaaaaaaaaaaaaaaaaaaagagaatgtgtgtaaaactagatactgatttttgcatatctcagcggtagaactgtgatttgttttatattcataacaatatttagtgagagtaaattttcagaaaactaaattaaaatgtttccattttatagaaatcatttagattaaaattttgaggccaggagttcaaggctgcagtgctctgtgaccccacctgtgaatatcctttccagcctggacataatagcaagacctcatctttttttaaaaaaagatacaatattcattaattttaacttgtattttgcctttgagcagttaatttggaatattttagcagatatcatttttggaatcatgaaaaatgtttaatgctaaatttatttcaattaatacttttatcaaaatacatccaaattttttttctgtattagtccattttcatagacatccaaattttgtatacattgaatatattaaatttctaatcatttagaatattactctcaatggaacacagattgtgcaaaatgctagactagaacaacgtagtggtaattttgctgaacagactagcaggacaaatatattttctggcatatataataatgaatgacatttatatttatcacttatccaaatgtcactatgcatcaatgagatgcctaagtgtgtaacagaacaattaaactcagccgtgtctggtgtatcaccagctttcaatctcatgaaatagtcaattcccacatgatttacattttgccatcatgaagggatgtctgtgaaagcagaagaaactatgatctaatgtgctagctgggtgtgtacctaactttcaaataggaaacacgtcatgtgggcttccgctggtgctccttgcccagaccccaaatagtagggaccggctggcaagaggtgggcactgagggatgtgttgcctgttcccgacctccaaggtcacggcagagcccacgctcaaaggggtctccaaagaggcaaggagctgggacgctcccaggtgccaggaggaagcagctatttctcccaggacaagggtcagaccttcatgcatatcaaatcacgagagctttaggaaatgcgatggtcctcgtcctccagggattcctgatgtcgctggcagggggtgcattagtcagctctgccgccatcacagaataccacggctgcggctatgacagcagaaatgtgtgtgtgctcacattctggggactgggcgtccaagatcaaggtgcggtacaatcaggctcccagtgagagttcttcctggctcgtagacggccaacttctagctgctctcagcacggcctcgtctttttgcacacgcggggacagagtgagacttctgttttctcttcttctaggtgcactgtattggtccggattctccaaggagacagcatcaccaggaaatgtatacagacacatgcgggtgggcttgtcagggggctgacagagtccccgcgatgacagaggctgaaaagacctgcgacgggctgtctgcaggctggagtccctcgaggctgagagcgagactcaatccaggtcctaagcctcagaaccagagaaggtgatggcgtaagtcactctgaagccaaaggccagagcacccgaggggaagcggctgcctggggatctggggatcattcagcttaaaatgcccccaagtgaaacagggactcagccaaagttgaaaattggtgacatcttttacatcttactggccgctggtcaagtcctgaagtccaaaggctttggagttgtccaaagacaagagaggatgagtgtgtccagcccagcggctccatgccctcgccccttctcttcattgttctctctggacccccagcatattggatgggcccacccatacccagggcagatccctgcctccagtcccctcagacttatgtgctaatcccctccagaaaccccacacagacacgcccacgataacactttaccgggttcccaggtgttccttagtccagtcgaaaggacaccaaagatcacccctcagggcactaatcccatcggattaatcagattaatccctgtggcctcgtttaaccaggatcactgccttagaggccccattctcaaagacagttgcgatgggggtcacggcttccacggaggaatcttgatgggacacaatctagtccacacgcctgggaaggcccagctctggtcctgagaccctgggcctgggaggcctccttggggcagcagcagtagggtgatgggaatgtccccttgggcagtcccccatggctgcccaagggttgaacaaggtggcagacttcatcactcagccccatccgtggcacactgaccatgtaaccaaaaggagcaaacaattgctaggatttccaacacagtgattcccacctggcacaagggaagccctcaaaacatgccaccgtcctgccagctctcttccctgacctcacacaaggagaaggagcgtccaagaaaggcgtcaacctcaagaatgcaggggccacggtgggccacatgctttctcttgttactttatttacttaaaagaaacagccgccgggcacggtggctcacacctgtaatcccagcacttgcgagcgaatcacaaggtcaggagttcgagaccagcttggccaatatggtgacaccccatctctactaaaaatataaaaattagctgggcatggtggcgggcacctgttttcccacctactctggaggctgaagcaggagaatcgcttgaacccgggaggcagaggttgcagtgagctgagatcgcaccactgcagtccagcctgggtgacagagtgagactctgtctcaaaaaaaaaaaaaaagaaaaaaagaaaaaagaaaagaaaagaaacaccgtgagcagcatcttcccgtgtttccaatggcctcttgggaaatgatcctgagaggggaataactctcagggcacatgtaccccctaaaggcactcccccatgagagaacagtcagactgccacccaggaagcctgcatagttaacgccagggcaatgcctgcctcctgcaggtgcatggtctagcccagcacgccagggcaggcaatggcaggtacacacacagtgactgagtcccatgtgagaacgtgatcaaaaatgcacgagcacagcaaattcgtgctccttcaaagacactctcgtgggctgcatttcaaagtgctctggcctccggggccattgggctgctggaggctgagaagtgggcatcccagccagcactcaaccctgtcactgtgccctgtcgtctcttagcagggaaaggcagaacgccttgtttgatgaagtgtcttataaatcacgccttgtttgatgaagtgtcttataaatctattacatttattttttcaagctactggtcttttgtgactataaaatactggactattggagtcaataaccataaaaggaaaatctgtctcacccctcatggaggacaagatgaaacggaagagggaaattgattccagtataggtttctccttctggctgggatcactgctggaaggcgtctgctgtgaccctgcctgcttttggagcagatgtaaaggatgaagctcctgggtgcctccaggcagggtggctgctggcctggcctcaggattggcaccactgcatgtggtccaggtgtgagttcaccctgctggaaatatcctgactgtccagcacacaaagctaatactgttttgaaccctcttctttgatgaaccaggcgaatgtccccttcggaaacattctttcacatccacaagctaggaggacttccactgcaacaattttaacttctgcccaaagagtcaactattccaaaacatgctgaaacctacccaagtgcactggcgtgaagagtgtcctctcaaaattcgtcttcacccaaatctcagaatgagatcttctttgagaatatttgcagatgtaattagtcaagatgagatcatataaggagtgtgggccctaaatccaatgccaggtgactttataaggaggggaaatgatacagaggcaaagacagggaagtgaccaggtgaagactgaggcagagactggagtgatgtggccacaagccaaggaacatccagggcttcaagaggggaggaaggaccctcctctagagcctttgaagtgagcacggccctgccgatgccttgatttcagacttctgacctccagaactgtgggagtaagtttctgttgctgtgagccactagtttgcttccatctgtttcagcagccatgaaagcccaatacatcgaggcttcacacttatggaagtggcaccattaaaaactgctgtcgatgtatttctctttggatgatatgtacgcttcaagtctcatcctgatatctttgcagaaggaggaaacaatcatggtagtcattgccattaacaaaggtgcttagaagccactgatttaacacagtatctgtgactggaaacagtcattaagaacacaggaccaggcacagtggttcacacctgtaatcccagtacttcgagaggctgaggcgggaggatcatttgagtccaagagtttgagaccagccagacaacagggcaacgttgtgagacctcatttctataaaaaatcaaaaatcaggccgggtgtggtggctcaagcctgtaatcccagcactttgggaggccgaggcaggcggatcacgaggtcaggagtttgagaccagcttggccaacatggtgaaaccccgtctctactaaaaatacaaaaattagctgggtgtggtggctcatgcctgttatcccagctacttgggaggctgaagcacgagaatcacctgaacccaggaggcagaggttgcagtgagccaagattgtgccactggactccagcctggcgacagagcgagactctgtctcaaaaaaaaaaaaaaaaaaatcaaaaattagctgagtgtagtggcacatgcctgtggttccagctattgggaggctgaggcaggagaattgcttgagtctaggaagtcaaggctgcagtgagctgtgactgcaccactgctctcagcttgggcaacagagtgtgatcctgtctcaaaagaaaaaaaagaacacaagctttggtgcggggcacacaggattagattccaatgctggggctccctcagggagtagattggatacagtgaacatacccagctttgtgttcatgatttcttctgcctggaattctctccttgtctccccctcctcctctcccagtttacatgtcatgctctcagataagccttccccggttacctttctgcagctacaaaacacacacacggtcgcatatgtgcatttaccagagcaagggattttgttaaatctgtgccttatctattttgtgtgtcgctcccaggagggcaagagacaaaacccatcgtcttcgccagtgcttcctcggcacctagtccaactcagcacaagtacgaagaaccaataaatgagcagtggcaggttcctggatgggcatgggaacaacacagctgagcatgacaggtcgccccaggaaatgcaaagctgatgaaacctgagccacagaggtggtgtcagtgagaaaccaaggctgctgctgggtggtcctgtggacaccgaagcaggaaagtgagtctgtaaagagagcaggaggaaggaaagaaaaagagggagaggagggggagaaatagaccaaggctggtgaaagagaagtggggacaaaaaaggcagaggggcagaaacagacagacagacagacagagggagagggagagggagagagagagagagagagagagagagagagagagagagagagagagagagacagagacagagacatcgcttccagccaagatggaggaagggaaactggatttagcgtcctacctgaaaccacccaaaatatatccaaaccaccaaaatatgtaaaaagaaaaataacatatattttcaaagtataggacaggatgcacaggagagaggaaataatgaggtgagccctatgatgactcccagctttctgcctcctcagggtttccagaccatgctgcaagcaaggaccacccaggcaaactcccagagtggaggcgatggggctgagaacacaggaaggccaaggtagctccagtttgtgggacaaaaccaggaggagagagaatggaacggagcctagtagagatgtgttcccttattcagaatatgatggatgcaagcatgtaacaaaccaccttaggccggagaaagaaccacccaaaaggactggcaaaaataatacatactaattacataggccaggaacagtgtctgttcccatctcaccattcatggggcagtgaacatacagaagggttttgcctcacttaatgggaaataatcagacataggctgaacactgccatcatcccgcccaacgaatattcaaagcaagacccaaaaggatcaagctgtttctaagtaaattaactaaatcccgcccccaaaaagctcaagaatatgtacagaaatccaaaacacacaggtccaacaagattaaattcatattttataatgtttagcaatagaaaattcaattaataaaacaatgaaaaattatcacacatgcaaagaagaaaatatgacccataatgaggaaaataaccaatcaaaagtaagcaaaaataccaatgttataattagcagacaaagcattcaaatcatattaactgtattctgtatgttcaaaaaggtaagtggcaacatggaaaaaaattaaacttccaaagataaaaactacaatatctgaagtgaaaaataccctgaatagaattaatggcaaattacacatcacacaaaaagatttgtgaacttgaagtcagagcaatagaaactgcctaaaatgaaacacacaaagaaaataataataacaccaacaaatgataataaaagaagagagtatcagtgaaccatgaaacaatgtcaagcagcctaatatgtacatagttggagtttctaaaaaaaaagaggggggaacagaacaaatatttctatttttggccaaaagttattcaaattttatgaaaactataaactcccagcttcatgaagctcaatgtaacctaagcacaagaatcataaagaaaattacaccaaggcacaacataacaaaatggctcaaaaccaaagataaagaaaaaatcttaaaagcagactagggaagggagacatgttacatccagaaaacaaacttaagaatgacagcagatttcttgatggaaatgattcaagtgagcagacagtggactggcatctttaaacgaaaaaagtcaaactagaattctataagcagtgaatatatctttcagaaatgaagtagccgaaagaattcatgaccaggagatctgtcctacaataaatgttaatagaaattcttgaggcagaagaaaatgataccagataaaaatatgaattacacaaaagagtgaagatgatcagaaatggtaaccatgaggctaaatatgcaagtttttcttatttaaacccctttaagacaactgactaagcaggaaaaaaatgtatcatggggtttacaagacatatagaagaaaaatatacaacaatagcacaaaggttggagtgggaaaatggaagcatattattgtaaagttcttatgcttacctgaactggtataatactacttgatgataaaagtgtagtaagataaagatttatgctatgaaccctaagccaaccattgaaagaacaaaacaaagagtaatcgcagataaaccaataaagataaatggaatcataaaattctattaatctaaaagaagacagaaaaagaagaaaagcagaatgatgtaacaaaaagaaaataaatagtaagatgacagatttaaatcaaaccattatcaatttttccattaaatgtgacccaactctaagctttctataagaaatgcactttaaaccaataagccaattcaaaaataggcaaagaatttgaatagacatttctccaaataaaatatgcaaatcgcaaataagcacgtgaaaaaaacatccaacagcattaggcatttggggaatgcagatcaaaacaacaatgagataccactttatatctactaagagggcaataacaataatgataataataagtggaaaatgacacatttggtgagtatgtagagaaactggaaccctcatgcactgctagtagaaatgtaaatggcgtggccactatggaaaataggatagcacttttccagaagtttaaatagagagtaacatctgatccagcaattccactcctagttataaatccaaaagaagagagcgtagggacttaaacagagctttgtacatgaatgttcacagcaacagtattcacaagcaccaaaatgtggaaacaaccctttcacctgtccatcaactgatgaatgaataaatagaatgtggtctattcatacagtggaataaaactcagtcttaaaaaggaaggaaattctgactcatgctacaacatgcacaagctttgaaaacattatgctaaataagccagacacagtaggagacatcttatatgattctacttatatgaggtacctagaatagccaaattcgtaaagccagaaagtagactggtggttaccagaggccagaaagagacgggagaggaactattgtttaatgggcacagagattttgtgaaaaatgacaaaagaaagttttgggtatagacagagtggtggttacacaatgttgtgaatgtatttaataccactgagtcgtacactcctgaatggttaagatgatagatattatgctatgcacattttacaacaatttaaaaagtctttaaaaagaactatgctttaaaaataaagacaaatacaaataaaaagtaactggatacaaaaaagcatacttagtattaatttggccaggcgcggtgactcacacctgtaatcccagcactttgggaggctgaggcaggtggatcacttgagcccaggagttcaagaccagcctggccaacacggtgaaacactgtctctactaaaaatacaaaaattattgggagtggtggtgcacgcctgtaatcccagctactcagcaggctgaggcatgagagtcacttgaatctgggaggcaggggttgcagtgagctgaggttgcaccactgcactccagcctgggtgacagaatgagacttcgtctgaagtgaatgaatgaatgaataaaataaataaaagaataagttaatattaatcaaaagaaaattggaggattatatttttttccagaaagctggataaaaggaaacatctcaatgccttctgtgaggccaatattaccccgatacgaaaaagaaaacacagaccaacattcttcatgaacacagatgcaaaaagtcaaaataaaacaacaaatcaaatccaacaatatgtaaaaaggatatttcataaccaagtgtgattttgatcaggaactgatcaaatttaacatttggttcaacatttgaaattaactgttgatttaacatttgaaaatcaaagcatactaacaaaccatattaacaaacaaaagctaaaaaccctatgagtagctcaatagttgcagaaaaagcatttcataaaatctaacacagattcaggataaaatccctcagcaaagcagaactggaagggagtcttctcagcctgagaaaaggcatctctgaaaaacccacagtgtccaccgtatttacatgggaagactgagaacttcctccctaagatccttgatcttacaaggctgaggcgtccactttcacacttctcctcagcaagacaagaaaaatacataaaatgcatccagagtgagatggaagaaataaaaccatccttgtttgcagaagacatgattgtccccatagaaaatccattggaatccttgaaaaaactactagaacaagtgatttttagcaagactgaagaaggcaacaggaatatacagcaatcaattatatttctatataattgcaatgaatgattggaagttgaaatgtcaaaacaactctatttacaaacgccaacagaaaataagacatgcttaggagaaaatcttggcgaaagatgtgaaagatttacacactgaaaacaacaaaacactgctgcaagaaactacagatgactcgataaccgaggtgccaccttgcaatgtgagtctcaaagtccaccttcatgcaaacctctgctggccaattaaggttacaggacttccaggcacaggacatcccgggagctgacaaccagtgttcacgctgtaacctgcctgccacttgggaatgacaagcatcttgctgaatttcccggggacaaatgtcattatcttcactttgcacttgcagaaaaacatgactcagaagcaaatagctctgggcatccttattccaggtgtactcacaattacatctaactccagatgtgccgaccaacaccttgttatttatcagaacaaaccacggggcacagaatatgtgcttttctttgaatggagtctacctgctggcattctttatcaagaggtacaggatagaaggaaagagaacagaggaagtggtttccaaagaaaaatgtggaggaggtgacaagctttgttaatttatggtctgggcagttaaaacagcttttcctaccagggtaggagcagagggaaagcaagaaaacacgaagttccttaccctgtgcccatctaacagcgctttgtacaagaagtcgacagtgaaagtctaggttgcaaagaaaaaaagaaaaaaaaccccacacacaaagttcagtttctaatgaaaatacatacaggcttctagaaaacatctacagatggcatttttttggcgggggcggcgggaatggcatgtttgaacaaacctgtcaatccacgtaagccacactacactaggccacacaccaatgtggatcaaatgaatttcagctcaggaacttacacttttaggaagtgctgaagctacaacccaagaaggacggaatttttaccagccaccactcttacatataccactggagaggaagcaaaaattcaggggcaaggtcagaccatcggacagtccctcccctccaccaacgcccacgaggcacagccccgtccggctgtctagtgtatttctggccataaagcaaccttccacttccatgtggcaaatcagccttacctctgcttgaaatcacacacaaaaaacagcagcgaagggatttcatttttaatgcatataaacacaaggacaaacaggaaaggagaagctgggaaagaaaccagagatggcggaagatccttgagtgcaactgctgacgaggggaggtctggagaagccgaccagcttgcagcacagaagtgcaagaaggcccaggaacggaattgcaggttcctcccgctgagctgaaggcaggaagcctggttcaaagtttgttaataaggtagcacttggatcccctcaacacagccagctcctctttctccactacatcactctcatgtgcaaagaagccactgggtaacaagtggcacatggcctttaagaatggcaatgacagctgggcacggtgacatgtgcctgcagacccagctgcttgggagggagggctagacaggaggatcgccggagcccaggagttcagggccaatttgggcaacataatgaggctctaaaagcaaacaaacaaacaaaaaaggcaatggtcatatgacaattcaggatctcagaagaatgaagccaaggtcagaatctcatcttgacaaccccagtgtcaaagaaaaccaatcggagtggccaccagcaagaggaaagggcaggtgctgaaaagaagcagcagaagcctccaagcaaggcgcccgctcatggtgaagcactgcaataccctacatccaaggcaaccgtgacaccgcatgcataacggaaccaggacaacaaagagccgcaggtgtggggacgtgcccaggaatcctcaatcctggacgccgtcagagccacctgtggagcaataagatgttcaggttcccagccccccctcccccgccaacccagatctactgaatccgaatctccaggggaacaagtgggaagaagaatttgtattttagcaagaaacctacgattccaaggggccacctggatgaagcatcatgggtgtgaccaaccttgccggaggggcagcgccctgcagtaaccctggcagggggtccctctctatccctgtctccccctcatagaggatggctgtgatgacaagtgttttctctcctgaggaggaacagaaatctgcttcccagcaagttccagaggctagggccttttccttccccaaggcagcatcttctttaggcaaaaaaaaaaaaatctctccaaacatggtcctattccaggttcccatgcctgtaagtagcacggctgtccatctgctgggaggagattgttttcggggctcctgagtttctacacacagagcagaaacagtgcctgtctttgttcagatgatcttttcaaatgtgcttgtagatggaacagccttgaagatggatttgtttcttgggactaccacgacaaagtaccacaaactggaattgaagcaaaaacggcagaaatgtattatctgacagctctggaggccagaagtccaagatcatggtgtgggcagggttggttccttctgaggctgtgaggaggcatctgctccaggcctgtcccccagcttcaggtgcatggcctcaggcgttccttggctggtaggtgaccatcttctccctgtgtcttcacacggtcttccctccatgtctgtgtctgaattcctccttctgataaggatgccagtcattctagatctggacccatctaacatttcatttcaacttgatcatctgcaaagtccctatttccaaagaaggtctcattctcaggtcgaggggttaggacttcaacatattttatggggagcggggatgcaaggtaacccataatggaagatatggtgtttccctctggtacaaacggcagacaggctcactgtctagcataaaatatttcgcttccctaagctcaatgtttctctcccacagcgtgccccaccatgcatgctggcatcatccatgcctctctgcatcacagtgtgggaatcagggctcagtaaaccagcacgaaaaccctgaggctctgtctagtgctactggtgtgagtaataaactccttcatctctgacctgggagtcttgtgtcttcatgaaactctggtgagctcacttgttagccagccaggaggggaaatctcaaagccttcaaggctcttgacagtttcgatgaggaggatgggatactcccacagacaaggctttctggaaggcgaaataaagaggctctgcaggctgggctccaaggatatgagaaccctccctggatcaggtagcaaatgttctcgtccaagtgatggagggacaaggggcaaaggtgctggagtttcgaggctgaggatgagaccctggatggaacaggctgcccgactcatgctgtgggtgaaactcactctcccccgggtgagcagagaggggctcctatcaggacaatgaggtggtactacccgcagtcccagctgtgaggccacagggctgcagctgctgggccaagactctggcatgctttagaacggtgtcagtgaggaggtgcttgcttttcaatgcaaagctctaagcaaacagaaaacagcagcccttcatctggctgtgccctgagcaactgcgacactgctagaaatcactacatcaatgcatgcggctcacaggcacaaggccactctccctctgctcccatggatccctgacacccctctaccctgactgcagctgctgtaaggagagagatgactgggggcaggtggctccatccccaagaaaccccaaagaccacccaggcccacccagcatgctgggaaacttcagggaggggaggagctccagcttttagggctctgttggagacaggtgcccaagtcacaaccccacccggtctcatggtgggagatggtgcctggacccagctgatgaggccaagtttattggggagagggaagctaatgtaaccttgtagggggagaggttggaccacgtcaacaaactggtttcgtggcctccacatccaaaagtaacatgggaaggggtgtgttctacgcttgtacttccccatttcacacgggccaagaaggacgctcctgactggggagcactaactagagcccctgggctacaaccctgacgactccatcaagctgcccatctcttgagattaccgactgggcagagggagacagcccctccccggcggcacctggacttgcctggcacggttcccaggcacccacctgtcactatgctctttttgaaactgagcatctgatccatggagggaggccttgtgattttcaggcttgatattcccatttttgggtgggccagctctgactcaatggcccacaagataggaaaggccccacaagcctcgctggtcaaacaaccatggtctattccacactgaggccaggctgcacacagaggcatcctggcccccacgaaaagcaatggctctcgcgtccatcacttgaaacaatgtcgctggcttcatggggcccttgattcagagtttgcccctgaatgtcggggctgggttcactgatggttcaacaatactgaagcccaatgatacccactgggctgcagcagctgctcaacccgagggctggctctgtagaactgcaggtgcccacggccatgccacttagcgggcaggactcagggcccttctcaaacctgtggccaactctcctcctgatgaacttggttatgtttttactgacccatgggcagctgctggcagcaacctcactgtctggtctgccacttggaacagtcagattaaagacgtccttctttggggccacacattctggcaagtcacggcggctgattgaacattctgggtcagcatgtagatgcctgagctcagagtccatttgttctttgatgagactgaataagaccaagctgttgactgggcctgcactgcccagaggccaccactactacccagatgcaccatcataccagagagcaccccatccaccactgcctgggcacaaagctaaacactctgttcctgacgcagaggccatctctgcataccagacttgtgactcctgcccacagctgtcccgtctgtaccccgtgagggcaggcccattgctcctgcctcctctcagccgatcaaccatctcaaaatgtggtgctctccccaccaggggtaccggtgggggcctcagcaacactgagaccattataggctaccatgatgctgtcccaatacaatcagccagcactgcccacactgttatggttgttgaaactcacctgtggcatgacttcaactttccagaccatctacactcaatgatggtgtaccttgtatcacaaaagccacttgccagcaggcagagcgttgagacactcgagggactgtctaccctccctactctccacccttcctaccttcacctccttctggtccttagtagaaaagtctgatcactatatatggctaatccaggaaggaatcatctcctcttggccacattctgagtaatggccaggaagagaaggatggggattatatagaccaactgtgaaaactcaaggttccaccctgaccattcttgggcatgaagcttctttcttccctctagcagcgagcccaggctggtctggttggtgcagcctccaggtgactacccagccaaacggggacctggagggttcaaatctcattccagttcagccacctggattctcctgttgactgacatggtcctgggttgcaaggacaacacacacttgggagagtacactgctgaccatgtccttccacatgggacaaagcagatacaatgggtcctccagctttataaaaatgcctcttgcacgtgacccttcagaatgaaagtctgggggcaaggaggggacaatcaaggaagaaggtgaagttgcagctattgtgacgagacaccaatttggggggtgggtggggaaagaacagcaaccccagagcctggagagggagggggacattaacagtcttgcctgtctcccatggcgcattcccaacaatggaaaatacaatggtacggtgacacccccaaagggtggtacatttcactggctgctgggtctagcattctctgcctttctgagtcatccatggctcattcaccacgatggaaaatacactggtacagtgacgccccaaaagtgtgataaatttcactggctgctgggtctggcattctctgaacccaatttgatgcccattcaccttactgtcactgagaaacctgtcagaaagcacatgggagaacttcagtcctgcacgtcccaggcaaaacacaagtcaacacctgctgatgtcttccccagccccagcctcacccctactcctggaaccactggccagtcattcggtggagtggacaaatgccgtctggcatggacacattgaacagtttggacccgcagactgaactgaattaatctaactgaaccaggcgccttaaggtctatcagtcatccaggagtccatgttggagacactgacaacctctatcccccaacctatggaggtccctcttgcaggggctccagcaattgtaagcaacccttactttccagggcaccgtgtgcccacagctctctacttcctgtgtggaagccaagtgtcaccttgcttccctcctgagaacacggacactcgtaccttagaggggtcataagagaccttcgggtatgtaagcagaagcactccctgcatgtcacatagccctcgatcactgagaagttccctccaaagtggagctgccctcagtgacttggttaacttttcgggttagtggcacattatttctgtgaatgctgcagacagctatccataggagacatctaactagaaaaggttgtaggaaacgtgtcccaggacttagggaaggtgatcaatgccactacctcggccctcggcattcagcccagcctcacctcaccatccagaagtgtcacagatgacaggattgcctttgacttcttccttgtggttcaaggcgaagtctgtgcaattgccgattcctcctgccgtagctggtttattaacacatgccgccaagcggaaaggtcaacagaaacttacagagaaactagcttggtttctaaggggaccctgaaggcttgtgggatttgctcagctggctggatccaggaccctggaagtcacaattgaggttaatactgcagtcctgttggctgctgtcttaattaaagactgcatgagacaaatggggtggatttggtcccaatctgcctgttaatcagcatggccaacagaatggcacactcaggaaaatttgccaggatgatgtagacatgaggggtagatattgctcaggaacagttcttcatgggtttctcatgttttattcagggacagttcttcacgggtttctcatgttttgtttggggacagtttttcatgggtttctcatgttttgtttggagacagtttttcatgggtttctcacgttttattcagggacagttcttcatgggtttctcgtgttttattcaggacacttcatgggtttctcatgttttattcaggacagttcatgggtttttcatgttttattcaggacagttcatgggtttctcatgttttattcagcacagttcatgggtttctcatgttttattcagcacagttcaagggtttctcatgtttgcccaggaaccgttcttcatgggttttcatgtcaggaatgtacagacccaggcagaagcctcagtgggaggcagtacttggtgggtttctcttgttctgtgtgttgcgtgggcagaggcactgactctgcctttttctggcccatcctctaagatgtttgtactgcgagcagccttggaagttagagacagtgtcttcctctggagcaaagggcaagtgtgcagaagtcatcctttatcaaggattctatttccctaaactcagcgcttccctcccacaacgcaacgtgctgtgcatgtggtgccgggtggccttccctgcactgtccttggaaatgctcttcctactggtgttgctgtgaggaaggaactgaccttcatctctgatccagaggcttcgtgtcttctactggtatcacgaaactgaggtaggctaacctggcgggtcaaaggtcagaccccacacagtccttgccaccacacatctgctcctcccattagaaactgagacatcaccggagacgtttccctctgcctctgccccgttttcccagccactcctgagacctggtgatcttgccacctccatctctctcacatcctgctgagacctccccttagtatcccctgctggtgtcactctggtcatggaccactggagctgcccactcaccatcctacccccatctgcccagccccttccagcatacgcctgagaaggtcagccccaaacgccctcagcagcccatgcccaggcctcagtacacaccatccctcagcaagttgtgcgttcccaaccaggacctgctgaggtctctccagaaacagaatcccctccctctggggagaaggacttcggcgcaagggaacaggaaaacactgcaaatatttacagtggacgtacgaaaaggcacaggaatactgagtaattgaaaggtggaaataaacgaggccccatgaattaccctggcaaccaggtacagccgtgaagacaatgaaattcactgtgcctataacccaaagtcaagatgaaactgaggtgtgggcccaaatgcaccgtgctggtgctagagtgccctgctcactcatctgtcgcccaccacacctctcctcatctgctgagggcctgccacgtccctgcactgtgctgggtgctggcctcactgagataactacgaccacctccaaatggagctaaggcctacgtggtttctcagggaccctgaccttctctctagcaggggtcacccctcacagaggcaagtgatgggtcaaggtgggtggaagcaaaccctggggttctctcaatacagcaggagcgggccccagctccacggccccccactcccacctagatggagtcccaggaagctgccccaccacagggcaacagccaggtcacagcaaccacagacggccagggaagacggagctcccagctcccagtgatgaggctctccgggttgggttgtgaaatagtcacatctgccattctcggctgaaatccccgaccactcattccctctccctccccttgttccaggttctcattcctgaggctcctcctggccaccccggcttcccgccatccaccagcaggtgtgtgattcccccaggggctcccagaccccgttctgttccatttcctggctcagcggtgctgttcagggcttattccagtcgctggtgcctcgctggtgaccaatcagtgcctgtgtaattgacaaactctaccaaacctcagagagtttctcagtagagagagtcaccccaactttattattttttattctttttctttttgagattgagtcccaccctgttgtccaggctggagtgcagtaacacaatcacggctcgctgcagcctcaacctcccaggttcaagcaatcctcccatctcagcttcctgagtagctgggactacaggagcacaacccccacacccagctaagttttttttattttttgtagactcagggtttctccatgttgcccaggctggtctcaaactcctgggctcaagcaattcgcccgcgttggcctcccaaagtgctgggcgtgagccaccgtgcctggccatggtcccaactttaccatgagcccaccaacactcagagaggacaagctctgtatctgaggccagcaggtctcagggacaaactccatgtccagagctcccctcccaaagcctgtgctgctgcccttgggggtgaatgaacacgggaaaggccgcagctgaggcctggggaagctcttctgccagcctggcttcaaagccccagcatctgggggaggcttcaccacgactgttaggacaagacgggcacagtaaggaagctgagcactccgagcacgagggcccagcccaagcgtccagtagcatggtgaagagcacagctgacttgctcccagcagcccagcccttatctgcaaggaagccccaagtcatccacacgtaggtcgaccaacagcagagacgtccacctgcagggccccaaccccacgactgaaaaagaaaccagccaagcacaggcactgctgcccaaactgcccagtggctacagctgccattattcagtcctcgctcttatccaagctggccttggactagaagatggccttgcccctttggagcagaggggaaatgcttctgcagctgcaaaggtgggcgttgttggcagcagcttcagaaggctttcgcttcttgtgttctccttccaagtaatcaataaccaggccctagaggcagcggtgctaagtacttagcaaggggacagcgtgaggctccatccagacccttaagcatctcggtacccgtctgccgcactcctgaactaacccctgcaatgggagaaagggacgtctataccacttctcagaagaagtgtggctcaccattgtctggaaaatgaggccttggaaccaacagatggttgatggggaacaagagaaagtgcgtcaccacccaccaaggcatgaggcctctgcagggaatcggcctcttaaggcctctcccctttctgacaacgtatgtgcagaagtgtgtgacgtcctgcaggccgtgacagaatgccaggacatgggaacaagggctgcacgcaggcgttgagaggaggcttctgcaggtcaggcagagccgagtcccaatcccacggctccaccctgggctgcgtggcctgcacgaacccatcatttctgtctcggcctcactttccccatctggaaggtggacgtccagcccctgcggtgctggagaaggccattgtgaagcttaaatgtgaggtatctctggtgtgtttgtgcatacatatgcatgcatgcatccctttctcccatgcaatgggagaaagggacgtctacgccacttctcagaggaattggggctcaccaagaaatacctcacaccagagataccaggcacagtggctcacgcctgtaatccaggactttaggaggctgaggcaggaggatcacttgagctcaagaggtcaaggctgcagtaagccacgattgctccggtgcactccagcctgggcaacagagcaagaccttgtctaaagaaaaaagaaaaaaaaaatgcaaaaatgaacgcagcacactcagctgtatccccatccatgctatgtctttgttcacaatttaatactgataaactgtgtgttatgagggagacaggacgctgcatatcacctcagatgtcttcgcctgggctaccgtacaaagcccggcagacagggcagcttacacaacagacattcattatctcacatcccagaggctggagtccgcacagggctgggtcctcctgaggcctctctgcttggcttgcagacaccaccttctcactgtgtcctcacagggtcatccctccacgcatccctcatagggtcatccctccacgcatccacagggtcatctgtttcctcatctcctcctctgttttttgttttgttttgtttggagatggggtctcactctgtctgtcacccagactggagtgcaatggcgtgatctcagctcactataacctctgcctcccaggttcaagggattctcctgccttagcctcccagtagctgtgattacagacatgcaccactacgcctggctactttttgtatttgtaatagagacggagtttcaccatgttggccaggctggtctcgaactcctggcctcaggtgcctgcctcagcctcccaaagtgctgggattacaggtgtgagccactgtgcccagcccttaactttattttttattttttttaagatagagtctcgctctgtcgcccaggctggagtgcagtgacgtgatctcagttcactgtaacctccgcctcctgtgttcaagtgattctcctgcctcagcctcctgaatagctgggactacaggcccacaataccatacctggataatttttgtatttttagtagagatggggtttcaccgtgtcgaccaggctggtctcaaactcctggcctcaagtgatccatccacctcaccctcctaaagtgctgggattacaggcgtgagccaccacacccggccttcatctcatcttcttatcaggacaccagtcctttggattagggtccatccatatgaccccaacttaacttgattacttgtctccaaatacagttacattctgtggtagtgggggttacaggttcaacttaggaattcagggaggggacacagtgcagcccatgacaactctccactctgttcttcatgacctgtggtgacggggctccttgaggactgttgggctatgactatgagagcccattgaccaatacgtcaaacaaaactgctactttatgtcagaatccacatttgtgatgcttgtacctcagtcactgcctggaaccctgtttcctgaatggggcaggatgacattggaaggtcccaggctgtccccactgtaattagaaagaccagaacctgagcctttatgaagatattttaaatgaaaagaaacacaaggtccaggtgaaaggaacaacgtgccccaccctgggtggaaaagcctcgcctttcccaggaaaatgacctaatcaatccaatttcatactctctgtcttcagtcattactggaatattcacttacaaatgcaaattgcaaagagatctatattcatcaaggcttcctttttcctagagagcttatcaagctatcagaggctatcagctcataaaggtgataggaaaaggtgacacccagagaatgcaatcatgcctgcttaattgcatcgcaggcagggtgcttgaggaaaagatgaagcgccttgtataaaatactgcatccttaatgggggaaccttccttgtcaaaggcaaacatccaattcaaacaagagttggtacagcttactcttcctcctttaaagaagtctgcaaaaccaaacctggctgtctggaaagtattagaaaaagagagaaataaaatccttcctctctttattgccatgttagatacacagagacaaatggcctccaggcaatgcagagacataactctgctaaagccagattcctccccgaaatcatactaataaatcaactcaaaccaaaggcacgggccccagtgatggtcacactcaccagaaccggctgagagggcttctgtggtgggtctggaatcccagcccatgggttctggggccgtctcatcagagccttgcagcaattccaagaggagtgtgtgagtgtgtgtgggagtgtgtgtgtgcatgcacacatacatgtatatgtgtgcacaaacacaccagagatacctcatttcctgggctccactacgatcagcagagctgttccatatcccagggcttgaccttgcgctggacgtgcaaacatctcatgaccccatccagaggaagggttgaggtctctgtcataacatgagataacaggctggaaagagccacaatttctgaggtcaaagggtactggcgtgactgttaggaccagagtccccatcccatgtgcccctagccactgcctgctccccgtccagagctctccagcctgctccggccctgggcacctgcacgagttggccagggctgctatggcaaagtgcacagaccaggcacctgaaaccacagagacacgctgtcccacgcccccggaggccaggaggcccaggtccagacagggtgggttacctctgcaggcacagattgttccagggccctctccttcgcctgggcactgccattttccctgtgtctctatacagctgtcgtcttctaaggacaccagtcacaatagatcaggccccaccctactggcctcatttaacttgattacctctttaaagaccctcgctccaaataaggtcacgttctgagtacttggggttagagcttcaacctgtgaatttgcggggacacagttcagcccacagcagtgctgctggcgggaagggctgagtcaagagcaagatcgttcccattttccatggaaatcaaggcagagagagatccccaagccttactgacaccaaacacatcaccacccactccaggatggggtggacagcaggtattcgggtaacccagggaaagttttgtgttcaaagtgacctgaggccacatctggggatgctggtctgtaggtggctgttctgatgggaccacagttactcacggggacaactaagcagtgggtgcccgatggagttgatgtcatgaagagaccccagcatcagtgccgcgtgtgacagctgagacctggggacctgggcgtgggggctgcaggaagtcggggcaggctgccactgcctcagcctcactctctctgtggcctcaaaccccaacgccactcacctgcacttctttaaatcacctcacctttgtgtcaactgagaattaagccaccaaacaggatgttaacagctggatccaaagagcaggtgccaatgggaggggggcaggtccagacagacacagagtaccagtgaccaaggaagtggatgctaagtgacatgcgggtgtgaagggactgaggaaatggccacatgtcttcagagccaacctgcaagtaattaaaatgtctaaagaccacaaagaaacgcaaaagagaaccagaccattaaagtgagctccaaacttcctggcaaagtatacttgacagaataattcaggcttccataacttgagcagggactggtggacagcaggacccagccctctgcaaatcacagaagacctgctacagctgcagagagcaaggaccatgaggaagaagcaaatcctgggtcccagcgctacatccaccccagtcaaaggtcaactccagctacttagacagaaggtccagtctgcttccttcgtgggttaatggtttacaatcccaataaggcttaaacctgagaacagacatgaagaaagaaaccaaagccacctgacgcgtgttgtatgtaaaatccagaaatagagctcactttttacgtagggcacctatttatatttagtattaaaaagtgcctaactggccaggtgtggtggctgacgcctgtaatcccagcactttgggaggctgaggcgggaggatcacaaggtcaggagatcgagaccatcctggttaacacagtgaaaccctgtctctactaaaaatacaaaaaattagccaggcgtggtggcgggcgcctgtagtcccagctactcgggaggctaaggcaggagaatggcgtgaacccaggaggcagagcttgcagtgagccgagatggcgccactgcactccagcctgggtgacagagcgagactccgtctcaaaaaaaaaaaaagtgcctaaccaattaatcttgtcatcacagccaaaatatgcaggtgaatgattgatggagacatgaaattttatactgaaagcataattttaagaaaagtgaaaacatttcttagatgtttcagaaaatttaggattcccattttcagtatattgcaattaataaggattatttacatacccgaaacagagttttttcatagaatttcaggaattcaggtttgtaaatgagatcacactgtaatcagaggcccactcttaaaggatcataaaatcaactagacataaacagagaaatccttgcaaaattaaatttacaaacttaaaaaaagtttttgaatgtatcactctaataaattaaaagtttaatgctaaaatcacacataacaaaaatactcttttctgaggggaaatcttcccttgaggaacaagaaaggacctggtgttggtacctgcctgccatagaggagagtcagtcataaaaataaatgtgatgggccgggtgcagtggctcacacctgaaatcccagcactttgggagggtgaggcaggaggatggcttgggcctaggagttcgggaccagcctgagcaacatagcgagaccctgtctctacaaaaatatttaaaaattagccaagcatggtggtgtgtgtctggggtcacagctacttgggagtctgaggcaggaggattccttgagcccaggagtttgagtctgcggctgcagtgagccatgatcacaccactgcactccaacctgggcaatagagcaagaccctgtctcaaaaataaattaatatatatgtgaataaatggatggttcttaaattctagctacatgctttaatctacccaaggctctcaacccacctctggttttttgtttttttctttttcccgagacagtgtcttgctctgttacccaggctggaatgcagtggcatgatcttggctcaccgcaacctctgcctcctgggctcaagcaattctcccgcctcagcctcccaagtagctcggattacaggcgcatgccaccacgtccagctaatttctgtatttttagtagagatggggtttcatcaggttggccagtctggtctcaaattctgggcctcatgatccacccatctcggcctcccaaagtgctggaattgtaggcgtgagccattgcacgtggccctgcctctggttctttctgctaaaaagggagagagactagcaaggtcctagaaatgtcaaaggctctctggcacaacaaaccaggggtctccctgcatgccctcccccgcatggctcacaaagacccatccctgcccgatgcaatggctcacgcctacaattccagcactttgggaggccgaggcaggcagatcacctgaggtcaggagtttgagaccagcctggccaacatggtgaaatcccatctctactaaagatacaaaagttagctgggcatggtggcgggcgcctataatcccagctactcaggaggctgaggcatgagaattgcttgaacctgggaggcagaggttgcagtgagctgagatagcgccaccgcacttcagccttggtgacagagtgagactctgtctcaaaaaaaaaaaaaaaaaaaaaacccatccctgctctcagcatttattggatgaaggccctcacgtgcctcgctctctccctaagggcttgagacctcacatggaacaaaatcaacataaatctctgccctgggagaccatctgttgtcctgggagtcaaagcagaactgaaggtagaagaacttagttccgtgactcagtgtgacccaacgtgtttgtatccacaaaaccatttcttcatttccttccccccagtgtccggcctgagcacatggctgggccctcccgggtggggtggaggagggtgtgggcaggttccaagatgctaccactccaagcatgtgctacagcctgtgccaacctcagctcacaaacctgctcaggcctgttcaaaaacagattaataaataagcaaataagtgtgatggctcttaagttctagctcagttctttcatctagggttaggcctccctggtgccaggcaagctgaggccgccaacaccctgccccatgaggccatcttcttctctgtctctccatctgggcaaatcccatctgctctatcagatggtgaatcctggggagatggaccccatgggtctcagattttagattttgtctgcatcttctgaagagaacctggcaggcattttatttatttatttatttttgagacagagtctcgctctgtcgcccaggctggagtgcagtggcgcaatcttgactcactgcaagctccgcctcccaggttcatgccattctcctgtctcagcctcccaagtagctgggactacactggcaggcattttataaaacactgttgattaaccgaaaggccatttctgagccacatcgcttacccatgctcagccccacggaaagggcatttaaagcaaagagtcttaatcaccaaccccagccagggaagaaggagtcgggcaccctggtcacaaactccagcgtcagagaagtccaagttcaaacacaggggcagtcactgctaaggatggtgaaagcgcagcagttgccgaagcttcactctgtgtgccgtttccggtcagctccacacccagccttcaaggacagcggcttgagtttgcatttttgccttgcttttaattaatttttttttttagagatggggtctcactatgttgcccaggttggtctcgaattcttgtgctcaagagatcctctcgcctcagcattccaaagtgctgggactgcagacatgagccactgtactcaggcacttttgcctttgtatgttatgaatgttgtggctggtgctggggcctcctgcccagcatctgtcccaacaggacagtgaccccagttaggatctccccctgtggggagtttggaggggccggcagctctcgggttaaacaatctcgttctcccagccagagaatggctgaggaaggctcatgccatatgaggagaggtctctagcggggcctccaagaagggtttctgcacccttgagaaacagccccacaggaaacaggccttctcttccccaggaccctgtcaggaacatcccactaccacatcgtgagtccacgagctgtgaggggtgagaccacagctgaccccgcagacgccgtcccctaccaacccccatccatggctgactccacaccacactggggatgggccaagaccagactcccttccacgtcagtcccaccggggtcccctcccgtccagcagatgtactggaggttcaaaatccagaagacagcagtgagcctctgaggcagatgtctcgtgtctgtgggcaagtgaggttgtgaggcggcggggtcttcaaaggcagagttggttctggatcctgcactggtggccgtggctcatggaggcctgagcatcctgtggcagtctccttagactgcagctttgagagttgcctgtgatgctcggcccagcatcgatggtcatgaccaggcccatttcctcgaattccatcccgttctgctcagtcacctgccaccatgccgcaatggacacggggcggaggcgtattcaatgatgtggcccggagcccacaggtgaggcactccaggccagggggcatgagggaccccccaagaaggtccagagaccagagacagtctcagcagttaccagtcacttcccttactcacaggaactgtaggccagcgttctcagctctgccacttgctgtgtcactttgagaaagtcaccagacctctctgaaccttagcccctccaactgtaaaatgggagctttacttcccacctcacaaggcaaatccacagaagtcagcctctgcagatgtgaacaagccgcatattaaaatagaagactcagccacaaactgtgtcactacctgtaggcagccagggtttgctccaggcaaatgggcaggcaggagccagaccgaatgaaatgtgacctgccgtagaggcaatacctgcagctacacgtgaccactcagtcaaaatgaaggttgcagtcacgccccaggaagaggcacttcatggatgggaggaagacacagcagcaaggttgccttggctctcaaagccttcgctaaaacgtgcacactccccaagccgcagcccacgcaaagcagctgcagcctcgaagggagcatgcagggaagatgtgacaagccggccactgcccctaggacctgagcccagtggatgcccttgaagcagctgggtcgtcaggaaccgtggaaggaaagctggccgcacggacaccgcaccctgccatagggaatcctaatcccctgcgctggaaagaccgaggacaaccttggccagacgtgcagaccctgtagccgtgagctgctggggacagagtcgggggtattaaggattcaaggagacagcaaaatgccaggcaggaatcccctctggcaaagagaatgaagcttcatttccaaatagattaatctctcaaaggcggacatggttttgtcttttagggcatttgtttccttagcaattttttagacagataaaattcacataacatagaatttaccactttaaagtatttaatggtttttagccatgttgtgtaaccatcaccactatctaacgtcaggacattctcagcaccccacatggaaaccctaaacccattagcagccacctcccagcctctggcaactgctagtctattttctgcctctgtggatttgaccaatctggacaatgcggataaatggagtcacatcatacgtggcctctgtgtctggctcctttcaccacacgtaatgtcctcaaggtgtatctatgcagtagtcctcatccgtaatccattccttttcaggccaagtcacatcccatcacatgggtacaccacactgtttatttattactcagctgacagacatctgactgattccagttttgggctattataaataacgctgccatgagcatgtatgtaaacattttcactcgtacctatgattccatttctcttggggacacacccaggagtggaactgctggctcatgtgctaactccacgtttaacttcactctacatttgacttcactctacatttgacttcactctacatttgacttcactctacatttaacataactctacatttaacttcactctacatttaactttttttaggacttgccaggccgtcttcctcagcggcagccacatgttaaccaataccatgggtatggctcagacagtaattctcttcccactgctgtcattttgtcttcaagcctttatctgcatgctcagtcaggagcttcacaccatggtcagatgtgtttgtcctcagtcaccagaccacagagaggtatcaagtctcaattaatacacacacacacacacacacacacacacacacacttcagatctttattttagtgactgtcatatggggaaaaccctatgtgtaaataaaggtatgtgctcaaagctttgttcagtggtgcattcaaccaatattgggcacctgcaatgtggcagggcctgccacgggccccgaggatgcatcagtaaacaacataaagcccccacaccgacctcccccgagccatcaaagagacagacacgacagtgatggtttaagacaattagcagtgcccaaaaattcctcccaagatggaaaattaatcttccaattaggccatgaggagctcctgcagatgacatgcattcatttccctcaactgttccttctccacagcaaccacgtgccctcccccatattccaacttgacaaagcggtggaaatctgaggcactgcaaagagagaggtctcggccacgagaagcacctcttgtctcatggatatatgggatccgttgtgatcccgaggacaagcacgtctttccacgcctcaggagagctgtgctgcccaccgctgcccgcccggagattgcgccgagctggcgtgtgccacaaagggtgatcaccacgctgtgtccactgcactccaatgccatgatggtcggagctgctgctgctgctactcacttggccacagacggcggtcactgatggcggtcacctgcacagcaggggctcgtgagtgagggtccctatgagccggttctctttcaagcccagacaccagtgacctcagctttaagataaatccagtgactattcccattttacagataagaaaagcaaggctgagaagtataggtcacaggttcacggccacagagtgggtacaaagcagagacttgtccacgcccagcacacagactccgagggtagtggggctggctttgaagtccagaaggagcacgttgtctcccaccaggagacgggggatgaatctgtgggaaggaggcagggatgaggcacctactccagttcctccagtcgccctgacccgaggaacaaacctgcctcccggaacctgcccagtggcttctgtcattgccaaatttcaaaggcacagccatgagccctccaaatggattagggtcccctgttctacaggataccgaccaattattgttatttggacaagtcctggtttatctgattctctgattcttcacagctgtgtggaggaggggtgtgcccacatggctcacgggtacacagtaggtgcttaatcactgtgtgccaagtgaatgaatggctgcttgatgatgagggtgcaaggtgcacaaacaactccctgcctttaaggcatctgcatgggcctggtggacacacccttctgccgggtggcagcccagatcaggaactcacctcagaggccactggttccccagccccatcccctcctcattcctcccctcagggcctagacaggtcatggaaccacatctcagaatgtgcacagcagcacagagggcacacaaccagccactctctgcagctcaggtccttgtaccttaagaacagcctacctggcgggtgggcaggtgactgaacccatttcagagatccatagactgaggtcagagaggtgagggtactcccagcccctcggcgagacaaggcagagctaggacccaggtcttccaactccacactcaacatcatacccacatctcaggctacccctcctcaggagctggcttccaggtggctctgcccaggtgtcaaaaggggtcgatgttggccagaatgacccaccgggaaagcagccagcacacagagtcactaaaggtgacctttgggaagtctctgagtcataggccagtcagagcacaccatggacaatcctcttgtccatgtgggattcctgaccaggtcccacccaaagggcacagcaaggctgtctccatccacctggccggctccactgcctgctgtgccaaagtcacctgccctggttaagtcaatgagcatgcaaggggcaacaatgagcacggcactgacccagggtcaaagccatgggaaactgccttggaaaaaacggagccagatgccaccaggatagttggcactggggctgggtgactttgaccctttttctctgttttccaaattttctgtggagcagcaaaataagaagtaaattgagatatggaaaacactgtgtgtccgcaggactgtacacacaggcatgctcatggagcaggtggccctgtggggttccagtgatctcaggtaccacctgcaagggtgggtcagcttttggaatcaagggtcacaccagcgtaatgaccatctgtgagggggaggcgcagggtctagggagatgtgccccaattgtctgctggagatggtgaggaggcagcgaacctttgccaagaccttagtggtcagcatttgccaacaagtcaatctcccacatgcctaagagataggtgctatgataacccctatttcaacaagaaaacaatgagatataagaagtatctaaatcagagagctaataaatggtcaaaccaagatttgatcctgtgcagcttggaccagatgccagacattttaatactgtagtgcaataaagggttaactcagcaggcctgggttgtccaaaccccacacactccaaagaaagactgggtccccaggacaattgcttgaactggggaggcagaggttgcagtgagccaagatggcaccactgcactccaggcaacagaccaagactccatctcaaaagaaaaaaaagaaaagaaagaaagacggggtccttacccagctcatgggagatcccctctgagccctgggaatatcctgtgtggtaagagtgcctgagttcacctggggccttgagtgacatcagatggcctgtgctaacaacacgtgttacagtggggaccccaggccacatggtagcagcgtgacctctcaggggcctggggactaaggccagtcatacctgtgtgaagaacccccaggaaaagccctggctccgaggctcaggagcagggtgcaggggtctggactccttgtgtgctgtcacacatctttggggggaaccatctacgtgccgccccgggagagaacacggaaagcgggcgcctggtctctcctggactctgccccacatgccttttgcctttgctgattccacccttcgctgtgatgaaccctgcctgtcgctaaaacagcttcactaaggactctgtgagtccttctcatgaatcagtgaacctggatgggggtggccttggggagccctgaacacagctgtcctgttccgaggaaaactgcaggccaggggtggggaaactgaggtctggctggatttacaagaacataagttacttttataaaagtcaaagatgtaaatccaaaaaaaacccataaactccatggaaatgatctggaaggggcgtgctcacatggtaactgcggcaccaggcccccggctcagggcacgggcagagggcccctgctgggctgatggtgcggcttggtaggagtgtcccacggggaggtaacaggacccagcgcacctcccatctgcgctgcctctgtaaagtgagcctgtgccaggaagggaccccatggacacgttctcgggtgacaggctccgacgggaagaggcaccacagggtgccgcttgctcacctcctctcccctgggtgaaggctgcggcaagggactccccaggcaggtgcacttcaccctgacacctggacgcctgtaccctgccagccacgcccttgcactttaggggaagatagggtttctgagaacagggtcccctcgaggtttcagctggggccactgtctccttccaagacagccccagtctaaccctgaccagagacacagaaaacaagaccaagaatgcactcattctgggactgctaagtgatgagggccaccctggagccacgccagacaagtcctgggaagggggcaggaggcaggggttcggagcactccaccttcccaatggcccatccacaggatgctgaccacggccgggcagggaagggacgcctggtcccaggtaggagggtccctctgcagatggagatgagggaggcaggggacagctagctcgggtgatgtcagccttgggtgatgtcagcctggcctccctcctccctccctcacctgccctctctcctcttccccatgaaggcagccccagcagggtgccccagttaacaccagaggcaggaaggccccaagtgcccagggagtcccagccctggattccgtagcacccttgtgtaatgagctactcagacccaagttcccgtggcctttgcagccagaggcctgaccacagaagtaccccaggccacggactctcagcacgggcccatcctgtggggtagccccttttctcacagtcaccaccccgcatccagcccacattcttcctagctttgggtcatctggaaatctggtggtcatgcctctctctggtcagagggtactgaccagcaccaccctgaccctcaatcagtggcaaatccagcagtgtcctgtggctctgcctcgtgcccctgctgggcgctcctgcgagaacctccaccctccagctcctgcctgtgcccctcttgctgggctccagtagaggctgcacagcccctcaggaggcagtgccaggagacccacgtgccaggacggagagtccccttcagcctccttccccagtccctctagctgtttgttagcattcaactttgggaagtccgagtcggccacccagagatttccaagatgtcagggaagcaccacacttccaaattttaccaggaggaaagttccagagaggggtaggtctgctaatgctccctccccaacacctaccaaggcactcctaatgtgcatctgggcatgttgggtcaggcgtgttatttatccacttgttggtggcaggggggtggcagagtccacagggtcactgtgggaagatggccaaggatggtctcttggggccatgtcaagagtcgtttctggatggctgctgagatctgggagaaaggaaaggcccctcagccctgtgtccccccagggctgcagcaggtgaaacggggctggggacctctggggagaaaagctccaatcagggctgagctctcatcggccccatccccatccagagaggagccaggtccaatttctctccgtgtgccccgcgccagcctgcatggaaccctccacgtttcctaaagtggctactccatgaacacaaggggaaagaatacgcgaactcactctgcaaagtacacatctgcccgtgctgatggaagaagaaggatgctagtgcaaagtcttctgtttctgaattccctcccattgcttccctctccggacaggcacacacacagagcgactccaggaagggctggaacaacgcctgcacgtgatcaacagcatccgcacacccggatctcctctgtgcgtttagttaactattccttagaggttacatcgtgactgttaaacagctgttggaagccaactcttccctctgaaaacatccaggcagaattaacactggaatgcggatctgcaactgccactcagagtgtcaggaagcacaggagcgtaaatatttagagaaagccgggagccagcagcgccgcacccccgccagcctacatccacgcagagagatcgcactattctcatatccacagttacagaaccacagcaaaattacagcgctcatgtccccatacctccaaaaaactagcttgctacctcagtaaacagttgataatttgtaatataataaaaacgtcaaggctgggtgcagtggctcatgtctgtacccccagcattttgcaaggccgaggcaggagggtcactcgaggccaggcatttgagaccacctgggcaacatagcaagacgcggcaactacaaaaaataaaagtaaaaaaactagatggacatggtggcacatacctgtagtcccagctactgaggaggttgaggtgggaggcttgcttgaggccaggagtttgaaaccatcctgggcaacacagcaagaccctggtctctacaaaaagtcaaagtaaaaaaaagattagccaggcatggttgtgcatgcctgtagtcccagctcctcaggaaggcggggagtgaggattgcttgagcccaggaggttgagggtgcagcaagctatgactgggccactttactccagcctgggtgacagagtgaggccctgcctcaaaataaaaaaaagaaaagaaaagaaaaaaaaatcatggaaggaaagaaaaaaaaataggaacatttggattcaaccaacactttaaaattcctttttttttttttttttttgagacagagtcttactctatcaaccaggctggagtgcaatggcgcaatctcggctcactacaacctctgcctccggggttcaagtgattctctggcctcagcctcccgaatagctgggattataggcttccgctaccacacccagctaatttttgtatttttagtagagacagggtttcacgatgttggccaggctgatcttgaactcctgacctcaggtgatccgtgcgccttggcttcccaaagtgctgggattacaggcgtgagacatcgtgcccggcccattttaaattttatttctaacagtctcagataggccaagcctcctacattaggtttgtttgcttgttgtggtgaattacattctctctgatttttcccttcttctttccaagaaaaggggaaattagcaagtttctaatctattttcagtgctttgctgagatgcaggtaaagtttaaccaagaagcaaaaacaaatcgacagagcaggacagcactgacgccagggccagctgccccgtgtgaccccgtctctctcagccaggtcttccagtcctcgcttccagaatccaaacagctctaactagtcctcagtgtgacaccgtcactggaggctgaccctgcaccaggcctctctggaaggtggcacactcagggtcactcttgcctctccaggctggagagcaaaatgccgagaaaagaattcctctgtgttcctgcctgcttcccaggcaggcttacctaaatttcaacaaattccactgcaaaaaaaaaagaaagattggtgtccgagaggtatactgggtttggcagtctgagggctcccaagaaaagcttttaagggccttaagacacctaaaacccacacatgaagaaaaccacagctgccctgaacatccaactagtccagcgtccctgtacttaaacccgaggaggggcacagaaagccatgcagtggtgttcccaggggccccactgtgcacccagtgtggcaggagggtgccctggaggggcatgagctggaagtgggcattgctggttgagtgggatgtgccagggcagggagaagctgtcctgggaaggagggcagccccagcagaagtgtcaggggagatggggaagttggggggagaagggacacgcaccagagcccagtatgtgcagaaggctccaaggatggactgggtgaggctatggaacaaggggagaaagaatctcaaccccataaaccctagcccgatgctgctttccaaatctcggatagctccaggggacattacgttgccaggacagggctgtgcacccaagtgttcctccccaccctcccttcccgagtcctaggcaggtgctgtggacattacaggtgggtataaaacagccctgcctcaagggagctcccaggatagagtggctggcatagcaagggagaccaacgagcagtctctggaatacgaaacactggcttggaatcctgattccaattcccctaggtgtgatccttggtgagttactgaatctccagcctcagtttccttatctgtccaaggcaggttggaggcttaacaagagagtctaggaagactggactttttattgagacagaagtgctcaataaatcgcatctaaggcacgcacacacacacactctctgacttagagcagaggttgctaaactctgggagatcacaggccaggaaacagaagaaaaagaaatttcatgatcctgttgagatgaccaacgttacatgtctccaggaaaaggcatctgcagaagtaagatgcaccgtcagccactgttcctcaccagagaggacactcggccccaatgtcaggggaaaggtcagagcagaataaagcccagtcctctgagtctaagccactgtgcttcaaaagcagaacgtccctctcaggccctggctctgctcatttcaccacagatggaaggagctggtcaggaaccagccaggctgaatcacgaagcaggaggctcctccagccccatccccaggccaggataaatgtcgctctgggtgaggacttgaggaaaaccacagggccttgcaaggactgtcatgattgttctcatcaagaaatccccttcacaatttgtagtgagtgggccactcccgacacaggccaatcagacacaccctcccacgccctgcctcaagaaaacccacgtgcagggctgacccaggagggagcttcggttcgcaggagcccagccaagcaggtgtggagggggtcaggcttccctgtccagggacacacctgggtgctcccctttgcataggtcgtgcctcctctcagaatcaggaacagccatggtgccccctcccaccagcacacacatggtcatacccagacccagctcctcactcttgactcagtgaacttctgggagagctgcaaagccaggcagcagccatcccttgtggcagaacacacagcagacaggaaccctgtgttggtgtcaatgtgctgggtgctcctgcaggagaccctccatactgcgtgtccctggactaccaaacagcacatctgctctggaggtgagggtctttgtcccatcccatcaacagagcacctgccgtgagctgcctagagagatatactggggggtctctgccagactacatcccaggggcctgcctggcaccccgtgggggctctctgggacagcaggacgtgtccattcttcacaagactcatcagatgcctggcgcccagtggggtatctctgggagtggcaataaaccaccgaggattcgacacaggacgtgggttgtgtgctgaggcatccattcttcacaagactcatcagatgctcaaacgagtccgtgaccccaaaatgtgaagaacagaagctttcgatcatctgcaagggaacttctgaaggcagcctcagtcccaaggggtctccaggggctgcaaaaccatccccagtatttagtggtgcatacctggtctcagcccttgccacctggtcctcttcattggaaatccacaggtatatatatatatatatatatatatatatatatatatatatatttatttattttttgaaacagagtctctctctgtcgcccaggctggagtgcaatagtgtgatcttggctcactgcaagctctgcctcccaggttcatgccattctcctgcctcagcctcccgagtagctgggactacagaagcccaccaccacgcccggctaatttttttgtatttttagtagagacggggtttcactgtgttagccaggatggtctcaaatctcctgaccttgcgatccacccacctcggcctcccaaagtgctgggattacaggtgtgagccaccatgcccagcccagatacatatttatattcatgtaatgtgcttttgtttctgttcacactcatctcacttcttccctactggcagactgttccacaagtgtcaggaaatccactgcagctggagaccagatcactccatccacccacttccccccacttgacctggggctcagtggataccaagagacccaggcgtctgctgaaggaactggggacagagagcaccattgtcctaaataaaacacactccacacctggacagcactctccctgctccaagaatgagcccggaagcctcaggactgaagagaaaaacatcttgggggcagtgaagagagtgtgatgcagcgccggcactcccctcatcctcacggatttggggaaacataacaggtccaagacagacgcatgaggagagggcaggggtgtattccagttcagtccatctgcaccgctgacaggatcctgccatttgacccctcagggtcctgtttcaggggggtcccccagggctgctgcagccctaattgctccccttaccaagttcacgatgacagctccctgagacacccacaggccccgtggctactccatattccctggcacccaaccctggactcagtccagcacactgtgtcctattggtcaatttcctttttttttttttttttttttggaaaaaaacattgagattttaaaatttacacatcatcgaattcactcatttaaagcatgtaactcagtgctcccagccttttgggaggccgaggaggtcagatcgcttgagctcaggtgttcaagaccagcccaggcaacatggagaaaccccatctctacaaaaacataaaaattagccaggcatggtagtgtgtgcctgtaatcccagctacctggggggctgaggcgagagaatcacttcagctagggaggtcaaagctgcagtgagccacggttgtgccactgccctccagcctgggcaacaaagcaagatcctgtctcaaaaaaaaataaataaatacaataaataaaatgtataattcagtgggttttagtgagttcacagagtagggtatctatcaccacaatccatttttgagcatttgcaaaaaaaaaaaaaaaaaattaacctgtatcccttagccatcactcctcaagctcccccatcctctccctcagtctctccccaaccactaattattttctctatatataacttggccactttgaggcatttcatataaatggaatcacatgatgtatggtgagtcaattctctttcattctttttttcacttcttttgagaaaagctttgcagttgtccagatctcctctgtgcatggttctttaagttgcatgcctgaatcacttcaaaatatgagatgggaacacactggaacgactctggcttaacgtccacctcaaagcctattcactgtgttttcagctttcactgaggtcaaagatatttgaaaccattttgttttttgcaaaaccccacctgcaaacaccgtgtcgcatgaaaaaattcttcctagatgagagcaccaagaaaagtctgctttccaaatgaactgatattagacaaaagaattctgttattccatctttctcttcttgccctggctgccaggaagctcagagattaaaaaccggatgttaactgtacaaatgctctcttatgctacagttgggtcttagagactcctcatggttcaagcagagttttaccagcgtggcatgcagaagactcatttgggaaaacagctaaaaagacagattcctactgaatctgatatcctatagataaggtcttaaaatctgcaatttaaataacatgcctaaaaatgttctcagacctggctttaaagccaaagcaaaatgtcacagcccttttcctaggacttaaaagacattctggggaaaacaagcctcgttcctcctcttgtatcatcttcgtcctcacccagtgagcatccatgtgcatcatgtggctgtttccaggggctgcagtgaacagagcaaacgtgcccattccacgagaaagggctgtcattgctctaagatgatgagaccatctttggccgagatggaaggatttatagaaatgagcatgctgaacacaatcctgttccctggatgaataaactcaatccaagtcctcaaagggttccagcagtttccatgaatccacttcctcaacgtcaaacaccagagctttgcaaagctttaggacgttcttgccaccaggaatccctgctctggtaggagaggtttctttccccatttccctcactgggtaaccaggtcggaacagcaggtggaggcacaggaagaggagcagggaccccaggcggaggcacagggagaggagcagggaccccaggcggaggcacagggagaggagcagggaccccaggcggaggcacagggagaggagcagggaccccagggggaggcacagggagaggagcagggaccccaggtggaggcaaaggaagaggagcaggaaccgaaagacactgtgcccatttctacagcgttgcagggtgcaggactgctgctgccacccaggtaagtccagggggcttaagggctgaggttctttacagagaacaagcaaaggtggaaaaggagaatcttcccgggacagcagggactcctagcagctgaggggccaggcacagggaggctctcacaacagaggcagatatttcccacacggccagcagcctgcacagctgtgcctgccaacaactgtctggtattttgtgaggacgccaagattaccatactctttcgtccctctattctggaaaacacagtttgctccaacctttcactatcctaaatagtgccaagttggacatctttatgatcacagtttcactttactcttccctctggataaatccccaggggcaaggtttttaactcaaagtccattttcctgtaaaacagaggttcaaacaccacacagaggagagcgcagactctgtcctctgtgctctggaattgtttttaatcactgcacgagccatgtggggcattagacctaaatagcattgttgaactctgagggtctccttctgatgttccccacactcggaaactgactccctgtgggaaaaggtggtggccacacctgagcaccgggctgatcttccttctacaaacatgtcatctccctctctggctcttgccagcctgccgcctccatccacacagaggaacggcctttctgataagcaaactggactaatcatgtcttctattttctgtcttaggacgttttgacatctaggggagcctcgcagacactgggagagaccgccccttccagagctggctagttcccaaagacagtaagtggcttccttgggccatttaccatgcactcgcatgcacaagccaaccacccctttttcaactcctgttcacccagccaatatgaaccacccctgccctaacgcgccccaggaccaggtgccaggcaagcaaagacctcccctacagccccaggcctgctgcagtgactcacctggcctggccctgcctctctcacagaaacccccagaaagggtctggcctcagtttcctcccacctcctgcctcctgaccaaaccctggggcttcccctgtggccccagggctcatgccccctgctcttgggaaatgtaagccataaaaccttcttttgggaaatctttttgtcctcactcagccacctccatcagttaaaatcccgcagcacaaatgagacagacgcagcaaggaagacagtttccacgcaggtgaggaaccgcgtgctggctcccctctggacctcccagcaacaaaccagggctccccaggccctagagggacaccctcccttcttttccacccacagccgaaacacacacagctgggacttctttcttctgtagccaaaagacatcgtgatttagcgccatcagctttgcttgagaaaacgaccttccctaaccacacgtttccgaagaagtgtcatctctgctcagcctgctaggttgggagactaaaatgtgaagatgggtctggctcagggtcccactgctgtctcagcaagtctggccagaagctaactggagtcaggccaagggggcatcactgtcagacccttggcccacccaagtgcccacccacacatctgtcgcgtgccaccccgggctgccctgtcctctggggtggggtatcgcgcagttctgactgggacccatgcagctgtcctctcgtgcaattgctaagaaggtgaagtggggtcacaaaaggccattctagaccagcaggtgctcgatgggaggcctgggggtggccacagcctttcgttctggtctccaggtattgaaggccaccaagcatcccgccttccacacatcctcctctcggcagggagggagaacagaatagggctgcgtggcggtttcctcctggatcccacatacacagaggagctggctgtgctgcaggtacatggggctttcccttcagcggacagctccctccaccagccattctcccacagcccacacgctcacaccatcaggcaggcatgccccgatgtgcgatgtccttcatcaaaacccctcgtgatagtgcagcttaatgccatccgagtgctggaaagaaccacaggccccagctctcaccctggagccgcagcagggcccacgctctctctgagcctcggtgtccaccacagtctcagcaggggcagcaccaagtaacatctggtccccctgccccctgcgtctgtacttttgaggcctccctggctcccctcaccctgtctgaacacgccactctgtcatctcaaggctttgtgtctcccatgaagccttcagcaggttctgccctggtcacccctggctgcccatcagcagggctcaggtcccagaggcaccgagggagcttcagatggtgcctcctgccaagacaggccccctgagcgaacgtgaggtcaggcctgaaaagaaagcaaggaaggcctgctgaggatgtacctcctttcccaggcaggcacctgcagaaggccacagccccaactgttccccgaggaggtgtccccacatagccatccgtggcacagtggctcccactcagggccctgctaatgtcctcggacatccatctacacctctctccctgcacacactgcaggcgtgccagctcaggagctcaaacctctgcaaacacgattatttagcaaaacccagacatgacaccccagaagcggcacccccactctgtagtcagaccacaacctttttagggacaaggagtggagtcaggctcccgcagcacctaccaccaccttgggcacattgctgatgctcaaatcaaatctttcgaaccacaatgagacagcgcctcccccaccctccaggatgaagataaccaagaagagagatgggaacagaagcaggcaagggagtggagcaagtggagccctcatccgacgctggagaggaggtccaacggcgcagccactctctggaacatggtttgtccctcctccactgagggacacacgactccacacggcccagcagctccactcctaggaatctacccgagagaaacgaaatcgcgtccacacaaaagcctgtacaagaatgtccaagtgtgtaaaagccaaaaagtgggaacaacccaaatgtccagcatgtgataaacataatattggattaaaaagatgctgtatcatatggtgcagtatcactcagcctttaaaaggaaggaatcactgaatcatgctaaacgtggtcaagccttgaaaacatgatgctgagtgagaagatggacacaaaggtcatgtattatacgattccatttatatgaactgtcccagatgggcaaatccgtagagatgaaatggagatttgtggtcgccagggccggaggtgattggttagagggattcaggaggagggagtgacttctaatggtacaggttttgggggggaatataaaaaaagattactcttcacaaatgttaatattgatttgggtgatgactgcgccactctgaaaatacagccacgtgctgctgtcaacatttcagtcaaggagggactgtgtatgcaatggcggtcccataagattgcaatggagctgaaaactttttatcaccaagtgaggtcacagccccagggacgtcgtagctcaatgcattcctcacgcgtctgtgatgctgctggcctaaacagacctcctgcactgccaatctaattaaagtctagcacatacaattttgtaggtacatagtactcaataataagaaaaaactatgttactggtttatgcatttactatattttttagagtatatgccttctacttattaaaaaataaagaggctgggtgcagtggctcacgcctgcaatcccagcactttgggaggctgaggtgggaggattagctgaggtcaggagtttgagaccagtctggccaacatggtgaaaccccgtctctaccaaaaatacaaaattagccaggcatggtggtgcatgcctctaagtcccagctacttgggaggctgaggcagaagaatcgcttgaacccggggggtagaagatgaagtgagtcaagatcgtgccattgcactccagcctgggtgacaagagcaaaactccgtctcaaaataaaataagagagtaaactaggggccaggtgcagtggctcatgcctgtaatcccagcacttcgggatgccaaggcaggtggatcacttgaggtgaggagtttgagaccagcctggccaacatggagaaaccccacctctactaataaatacaaaaattaattgggcacggtggcgcgcctgtaatcccagctacctgggaggctgaggctgagaatcacatgatccctggaagtggaggctgcagtgagccgagatcatgccactgcactccagcctgggcaacagagcaagactccgtctcaaaaaaaaaaaagtaaactgtaaaacagcctcaggcaggtcttccagatgttctagaggaaggcactgtaatcacaggagatgccagctccacgcatgttactgcccctgaagaccttccagtgggacgagatgcagaggtgaaagacaatggtattgaatatcctgaccccgcgtaggccaaggctaacgtgtggatttgtgtcttagtttttaacaaaaaaattaaaaagtaaaaaagtctttgaatagaaaaaggcttatggaataaggatatatggaaacaaaatgtttgtatagctgacaatgtgtgttttaagctaagtattactgcaaaagagtcaagaggttttttgtttgttttttgagacagagtctcgctctgtcgcccaggctggagtgcagtggcgcgttcttggctcactgccaactctgcctcctgggttcacaccattatcctgcctcagcctcctgagtagctgggactacaggcacccgccaccacgcccggctaattttttgtatttttagaagaaagagggtttcaccgtgttagccaggatggtctcgatctccttaccttgtgattcgcctccttaccttgtgattagccttccaaagtgctggcattacaggcatgagccaccatgcccggccaagaggtatttttttaaaaaaattaaaagtttataaaataaaaaagttacagtaagctaaagtcaatttattattgaagaaattcttctaattttctttttcttttttttttttttttttttgagatggagttttgctcttcttgcccacgctggagtgcaatggtgcaaccttgcctcaccgcaacctgcgcctcccaggttcaagcgattctcctgcctcagcctccaagtagctgggactacaggtatgtgccaccacgcccagctaattttgtatgtttcgtagagacggggtttctccttgttggtcaggctggtctcaaactcccgacatcaggtgatccacccgcctcagcctcccaaagtgctggaattacaggtgtgagcccccgggaccgggctgttctatttttaaattgaatctgtggtgcccagggatgagcagcgtgagggcagggtatggaaccttcatcgctaccttctcaccacccagctgtccacatcagcacagaacacctacacacccaatctccatcaactccaaggtctctcgatgggaaagactcacgtgaaaatccaatgacccctgaaccagacacaagttgcagtggcagcataaacagcactgggcgtaactaactgggaaggaagccccagacttgctgtcctgccactcaacccagcctcgttcttccagcactgctggagactgtgcctgaatgcctccctcttctgcagcccccagcaggaaggagtcccaagcagccttctctgtagggcacccagagagagtggcatctgtgcaccccacaggtggtcagcatcctacacagacatcgcagaagaatgtaacggagcttacccaaggctctgtgggcaagcttcagaccacgaggacaccatcacgtgcaatgtcccacataccagcatttagagaagccagatgaggagagagcatttctcagaatcacatcagagaaaagtggcatggttctaggcaatgcgctgagatcatttagaacaaggcccacaaaattttctgtaaaagtccagctggtaactactctcaactttgcagagcatgcagtctgtcacaacgattcaactctgccacacacaacgtggaaagagatgagcacggctgggtgccaataaaactttattcacaaaagagaacccagattgtcaggaaatatcacaaattacacatctgaccagggattagcatctagcatatatcaagaactcatacaatccaacaactcaaaaataggcaaagaacttgaatagacatttttctgaagatattcaaataaccaataagctcataaaaacatgctccacatcactaatcaataggaaaatgcaaaccaaaaccacaatgaaataccacatcaacaccccctagaatggctattttaaaaaacaaaaacaaaaaaaacaaacaggccaggtgtgatggctcacacctgtaatcccagccctttgggaggctgaggtgggcagatcagctgaggtcaccagttcaatattagcctgggcaacatggtaaaatcccgtctctactaaacaaataaaataaaataattagccaggcatggtggtgggtgcctgtaatctcagctactcgggaggctgaggtaggagaatcacttgagcccaggaggcagaggttacagtgagctgagatcacaccattgcactccagcctgggcaacagagcgagactccatctcaaaaaataattaaattaaattaaaaatttacaaaaacaaaaacaggccaggtgtggtggctcacacctgtaattctagcacttggggaagctgaggtgggtcaattgcttgagctcaggagttcaagaccagcctggacaacatagtgagacccccccacccatctctacaaaaaaatttaaaaattagccaggcatgatggcacatgcctgtggtcccaactactcaggaggccgagatggaaaggaggattgcttgggcctgggaggccgacgctgcagtaagccttactgtgccactgcaatccagcctgggtgacagagtgagacccagtctcaaaacagaaacaaacaaacaaacaaacaaacaaaacaaaatacgagtgttggcaaggatgtgggaaattggaacctttgagccttgctggtgggaatgtaaaatagtataaccgctgtggaaaacagtacggcagtttctccaaaaactaaacataaaaaaccatatgaacctgccattccatttctgggggtaggtatatgcctgaaagaacgggtggatatcttgaggagatatatccgcacacctatgttcacagaacactattcacaacagccaaaaggttggagcaacccagtgtccaccactggatgaacgcataaacaaggtgtggtccattcacagaaggagtatttcttaggcttaaaaagaaatgaagttccaatacatgctacaatgtggatgaccctggaggacattacgttaagtgaaagaagtcaggcacaaaatctcacatgaccccactcccatgaggttcctagagtggggaaatccatggagacagaaagttgaataggggttgtcaggggctggggaagaggaatggggagggagggttcaatgcggacagagtttcagtttggaaagacgaaaaagttctggagacggttggtggcgatggttgcacagccacataaatgtgcttaatgccactgaatggcacactttaaaaatcgtgaagatgggccaggcacggtggctcacgcctataatcccagcactttgggaggctgaggcaggtggatcacttgaggtcaggagttcaagaccagcctggccaacatggtgaaaccctgtctctactaaaaatacaaaaattagccgggcttggtggcaggcgcctgtagtcccagctacacaggaggctgaggcaggagaatcgcttgagcccgggaggcggaggttgcagtgagccgagatcatgccactgcactccagcctgggcaacacagtgagtgagactccatctcaaaaaaaaaaaaaaaagatgaagatggtaaattctgtattatgtgtatcttgctaagactttaaaaataaaaacaaaatttcatttacaaaaacaaggaatgagcaggattggaccctcacaccacagtctgccagcttctggttgggcacaaggcagtgggtgcccagcaggagacggtggccggagcgcaggtgcagaggacagggtcctcaccccagtccttccctggcaaatgccgcttgatcccctgtttccccacccaggagggtgctctggagcatatcctcttgggtcatgtcattaatcattagggggtgcctgattacacccacaagtggaaaatataatttgagacaatagcaaagaacacctcaggaaaaaccacatcttcaaattcatctaatctagtgtcttcaacagtcaatgagaattgcaacattgtcaattaattccgttactcctaagtggaacccttctgccactaattatgcgataccctggctgctcactaaattacccctcgagggcaattttccagtttttttctgagcagcaaggggaggtgatcggtagacaaggttagaaacccaggatgtctgcaggtgcctaggcgctgggagtctccactgtaaaatgacgctgcagccatggcacgggggcgtgaggtgcccacaagacaatgttcatgatcaatgaatgggggtctgaggacattgggagagccactgaggagtagggtcccttggtggctcctgttagggcggaactgggacacctgaggaagcaggagaagccgctggagggtgaagcgcccaggtgagcatggccgggttggtgattctggctcacccttccctgcaccaggaccagcaccgcctgggcttcccagatcatcgacatccccaagaggaaaaccccacccaccccaccccatccagcaccaccatcctgcctccagccgaggggactgatcttcccagaaagcagcacagctcccctgtcccaaggtcaccaactgtgtgggctgaaagtgccctggccagaaaaacaaaactaaaacaaattcactcccagccttcgtgagttgcccagacaagtttttccttctctccttcccattaatcgcagccgccagggttgcagggttgcagggctgctgctctggaagcaagcgctccccatcacttgtgagccaacggcagctcccgagtgacaagcaaaggctcaacccaacagcctgagtgttcctttcttacgaagctcccagaggagctaagaagggagtttcagggagacaggtcccagctgtgaaccgaggcccagctggccggacgcaggcgccttccaaaggcagaagcgcatgcacgccatggttgttagctctgccccagccccgggagagagaatgaataaatagcaagccccaagtccaagctccgaggaagccaaaggcagctgactgctgacaacatcttatggctcaaccccgagcctgcagggacacgtgctccttcctgggtggacagggactaatgtccttccctctctcagtctgctcctgctctaggataaaggggtggaccaccttctccagcagggtcacacgttctcatatgcatccttgtgacacctttcgaggaggaactgtgtactgggccagtgcttctgcacaagggacaagtatgcagcatcggccacagacgagggggactgtggaggatacagacccagccctcagccaagacagccagggaaggcaggagcaccctccacggagccgtgtcaccatccctccatctgggaggacacttgtccacatctgggaggtgagtgacagcagaggctagagagggagctcagagatttggagggacatgcaggtgcagagaagggcttgaacatggggagggagagagtccgactgcatttcagacgggattggtgagctgtagagctggagacaggaaaaccaggcaggtgaggccgcccaactgcgatggtggccaggaccagggtagtcctgcatggggccgtgactccgacattctgctcctgcctgccgcgtttaggaccccagggtgtgcattctcatggggtggtggaaggtgaagcagagataaacgatcagcacagcaacagccttccatatgcgtggcttcagttaccctgaactcaaccaaccatgcgcacattggaaatattttttagttgcatctgtaccgaacatgtacagacatttttcttgtcattattccctaaacaatacagtatagcaaacatttacatatcatttacattgtttaggtatcatacacaatctggagatgttttaaagtatatgagagaaagtacttaggttatatgaaaatactgcaccatattaaatcagggacttgagcatccatggacttttgtattcatgggaggtccaggaaccaatcccctttggatgccgagggatgactgtacggcccttccacagtattaagatctcatggtgcacacaattaggaaagtatatctgacgcagcttcttgggcaggcccgtgcagctgagaggcccttccctgcacggggcaccaccaggtacacccccatccacgtgaaaatgacggagaggaactggaagcgcctgcaccactcatctgtctgcagccacactgtctgggtctggcatgggcacgttggtgaggatagctcagaaggattgagaaattgcccacagggctctggaccacacagatctgtctttatggtccctggtatacaaggccatgccaggaggcaagggtcctataccagcaggagcccagtgtgtggtcaagccaagctggattcagccactcaatacccacgtgaccgtgaccaagtatctaactgctgagagcctgtgtcctcactgaaaatggtggtaattccactttctgcatggagctggtggtagtcagcgtcaacgttgataagatacttggcagacggggcctttaagcacattacaggtgaggtgataccagcaaggcacagaggaggcgctcaagaatagagccactgagcaccagcccacgatctgccctcttcagagcacacagacctgggcttcactgcacccttccctgcacgtgggcatcacgaggcgcacccccgttcatgtgaaaatgacggagaggagctggaagcacctgcaccactcatctgtctgcagccaccctgactgggtctagcctgggcacactggtgaggacagctcagagcacggtccagtagccagaggcatagtccctttcatatctcgcaaggtcacacaagcgggccaccaaggacaatgccatccaccctcttcccacccaaacacaagcacagggcacacagggcctgacaacaagaaacttaaagtccctggccacagtgcaaaggtggggaggtggaccaaacccagacagtggccactggcttgcaggtaacaaggacaggggaaaatgttataactcaccagaggtgttgggagactgagcctcacagatggcctcttagagcaggaactgtctgtattctagagggccaaagcagggtgcctggagagatttccagacctgtggagagataatgagaccggggcatggtcagacacagactgttgagaggcacatgttaaaacttcatgtagattctgatatttctgtgctaaaaaccagggatcgaacttctgcttccgggcaattggagtagacacatttttccctattcctcacacaaagcacaactaaaactcaggatgctgtatataaaacaaacctaacactctgcaaggtggagagaaggcagaccagccagggacatggtgtgagctctctgggttttcttcttgcctcatacatcccagacgtggtgctgaataagccagcaacccagaaaagccaacaggagcaggaacagtaccacaacaaaagcatattctctttagtcgaaagactaggaaagcggcagctaacagggcaatatatttagacaacaggtctactccagccagacactgcagaaaaatctgtggcctcagccccacccacagcagcaaaggccgagtagggagtctagatttccaccctgtgtggctataatgaagcaccaaatccctgccagcgtggcatcaaatagagcaacggaaggagctagcacattcatccccaccaggcagtaacaaatcctcctttcactccggcattagtataggcagcatggggagcctggatttctatggcacctgtcagtaatgaggtgacacccctttccaccttcccttgtggaagtggcgtcaggaaaagttagcttacaaaaaaagtttaactaagactaaaagtctcataacataatacaaatatgtccaagtttcattagaaaatcacccatcaaaccaaggatcaggaagatttcaaactgaaaaaaagaaaatcaatggatgccaacatggaggtgacagagatgtcaggatgatctgacaaagagttgaaagcaaccatgatgaatgcttccacgaacaattaggaacatgctagaaacagatgaaataacagaaagcctcaccagagcagtgcctttcaccaaagatataaaaaagaatcaagtgaaaatgatagaactggccgggcacggtggctcatgcctgtaatcccggcactttgggaggccgaggtgtgtggatcactcaaggttagaagttgagaccagcgtggccaacatggcaaaactccatctctactaaaaatacaaaacttagccgggttggtggtgggcacctgtaatcccagctactcaggaggctgaggcaggagaatcacctggacccaggaggtagaggttgcagtgagctgagatcatgccatgcactccagcctgggcaacaagagtgaaactccatcttacaaaaaaagaaaagaaaatgatagaactaaagaatacagtaactgtaataaaagactcagtggatggactcaacagcagaatggaggggacagaggaaataatcagtgaactggaagacagaacaacagacattatcccaactgaacaatagagtgaaacagactgaaaataaa

SEQ ID NO: 544 - DNA, 13152 bp, Homo sapiens
  source 1..13152: mol_type = genomic DNA
ccgccgcggcccgactcccgcgggtctccgcgccgaacccacctggctcctatcgcacgggacattcccgacccacccacgccgcgtcactgagcctctgtaccgatacccggcgcctccgccagcagggcctggacgcaccgcctcctttgacctcgggcttcccccgcgctccgctgcttggggcagactggccccgagagggagccaccatctcccctgctccagggtctccagggtccgaacccgtgttgggatctgggttaggattagggtttggagcttggagcctgcctgttaggacccccggccccggcgccgactggagctcgctggaggccacaggaccacggcggatggcctggctgcttcagggcgtaccatgcccgcaggcagatgtttattattaaaaactaccgacgttcatcaaccaggagacccgcaaggcctgcgcactgaatacggcccaaatcctgttcagtggtctttgaaagttaaaagaaagaaacctatcgcccacgtctatgctgaggaacagctttgaatacgagctaagacctgggagagggccaagtgggggtggtggggaacactgctggaggatgtggggctttggcaggggttttacgcaccctccagcacgagggtggggggtcccaggggacgctcaggactctttcagtctttgcggaaggtcccgtcatcacaagagcccgcgcgggaaggaaagttcctgccttggacatggtcagggccgagtcttcaaagtctccaactatccccacacaggcagcacctttgggctttactagtgggatttcttccagaagggggccacgacatggggagagagagctcctcattattttcaaggccaggcttttcctaaacccgattctggcttccaccttctaaatttaaccaatgaagaagctgcttcagccaaccctaaacaggagtgtcagatggggaatcctccctccacagtgccctggcctgcccgcctttgcggctcttttcccgctccgaagtcagcacctgccccgctccagagagggtcaacgaactgggactgattgtcgattatgccataccaaacccaggttgatttcgctccgcaggatccctccttccttcctcccaaaagtgtccccagataaagactggaattatagcaaaacgaataacgagagtccatcttggggaaggaagttactctatcctatgttattttacttcttatctgttctttcattaatttggtataaccctgtttctatgctgggtggataaaatggagggggccggcggaaatgcgctcagcgctaacgacagccacagagccacccttcttactgccccttgactgcggcacgtaagagcagaggcaagcgcttttccaagttggtatattcgagagagtgatacgcattaatcaaaagggaaagactatcccggatattttaatagtaacaggaacaaagatgactcgaaccccatcaaatgaaacgatattttcattcaattgatcgcaaagtgtcttcaattaataacttggcacttatttaaaaggtttaacagaattggaggcgacacattttgtactgacaacacgtcatgagataacatcttttgtttaaaataacttaatacactagaaaaaaatatgtcaaatataaataattttgttttcatggagaacaaatagttacaaagctcaaccgcataccaaagttcagttagaagagcttttcctctttcttgtaaattagaaggtaaaacaaaaacaaaaacaaaaccccacaaacttaggcttgctagcgaattgggatacagactggcttagtccaaggtatcccagtttaaatagctacatgaattgaaacaaacaaccaaaagaaaaaaaaaaacaaaaaagaaacaaacaaacaaaaaaaaaaggttacttgaatagatacacctttgtgagataaaatgcaaatgttgaaagtcagtccacacattatagtcaaaataaactttgttcgtgtgtatcaacatatcttacacaaacctagtgcctgtatctagctgggtgttatttaaggtgaatttgacgggatagagagggggaaataaaccactgtcttcaaataggacttcaggaaaccaacaagaaggaacacaagaaaaggggaatggtgggaactaatactgattgagcgcctactgtgtctggcacagcgaggcgctgtaccttcattatttcatttggtggtcttgttttctttttcctttccccacatattctgcccacctctgtcttcttaggacaatgagtgtaattttttccctttctgacttttttcttttgttccccaggatcaaagacagggcaaatatatatatatatatatatatatatatatatatatatatatggcaaatatatgatatatatatatggatatatatatatcaatttccagatacttttggtattgtttttcatagtgaagatgaaaatggagtgagtgcatgggagataagggggtgggaggagacacaccatcaatggaatacaagtaacatgcaaaccggaatttactgtcagcagtccagacagttttgccataataatttctcagagaaatcattgtctgtggcatttttttgtgttaatattatttttctctctcctcgttttaatattttctcttttcttgctcttccatacatggtgggtttaaactcaaagcatctgattcaacgtaaaaggaggcccgcctctctcatcaaatttctcgtgttaacgtgaacttcgcagaaaaaggtcagtttcaaaacctgtgaacttcccagctgcgcacttttttcatcttagttttttaaataagtatacctcttctttctgctttgccttcttagcgcatttttaaaaacacacatttaagttggtaactccccccagtctctcgagaatcgtctgggttgtttttccatatttttaaatgtataaaatactttaattttaaaatttgtttttgctccttggttctccaatttcagcttctgccaaatagcagttaagaaataagttcccttcctctttttctctcccgtttgtctttcgatttttttgtttgctcattttttcattgttaacaagatttttttttctatgcaagagtccatcgttgcagctttgcggtgagccaaactccgcggttccagcactcccctgtccagtctctctccagactcccccaaacccgctcctacaaaacccaattctaggccctcgagtaggaaaacgggcaggagccacggagcctgcgtgcctcgtgagatccctggtcctgcgtggagtctggctttccgagtccaagatgcgataggggacgagggatggtcagtgaggcgggaagagggccggctcccgaggtctcaaaggggtaacggagaagcagcggggcgcggagggcgtgcaggctgagtgccgcgggacaggcgcgacattggtgctggcgttggcgtcacagacccagggctgcggcgtgctttttggctttcagtctgagatcggcgatgctggagttcttgctggtggtcttggcggctgctgcggccgccactaccgaggcggcggaagccgaatccgcggccagcgtggcgagcggcagtccgaagggcggtgctgggaacatcatgtagggcgcgtgcgcggccaggtgcggatgcaggtggtggtgcgcgtgcgccacagcgctgtccagctgcagctgcgcctgaacctgaaaggacaagggcgtcacgttgcaatgactatcctagggtgacaacagaatagaaacagagcattaacggcgtccagcttggccagagagagagttgggttgtgtttgggcacggggagagggcatttggctgtgcatcttgttccgacagtgaccttctcagcctgttgctgaatctggggttccacatggatactccagtgtcccctgggtctccgaaactcgcttagggtaggcttatttccccggaccccgggaacccccttctgcaggaatgtggccgtctcccctgggaactgggctgaaatggtatattggaaagactgcgggtgaggacccttaccctcttctcttgatgctgccatgcatctcttaccccactaccaaaacaacggagtatcaacaagcaaactacgcaactttttaatgtcattcagggaagttactccatcttcaccacaataggcacaattgtgagtcggtacttctaacctttattgccataacaattacccagggatctcgttaaaattcagattctgattcgcaaggtctaggttggggcctgagattctgaatttctaacaatctcccagacggtgttgttgctgctggcccaaagattaccttttgagtagtaaaggtctccttttaaagtcacccctccctctttcttcagtcattctctcttgtttccaaagccaagcatcaggatgccagagtcctgtggcaccaagagagctaagatctccctaacaccgactctcaattcatggtcacacctatctgtctccccggtccaagtcactggagactgagagctaattcatgacatcacaggcatgccaagcaggggtcctggctgaggatagggaaggtcagacactggttgggaaaggatttcgccctcaggcttggaaagtggggagttcagagcactgggatttcccaggattaaatcattgctgcaggctgtccttttaaaatgtactcttaaaggtttctttatggctaagggattgcaaaggcagggcagccctgggaagaccaagacttctctctttaccagagatgaagctttgtttgcagaaacagatttaaaaacaaaagaacgaaaaaacaaaagtatgagctgggagtacttgtgtttatttttcttctgtcagagttatttaatgtgactaagaggtagaaaatacctagaaaagtatctagagggttgccttagaaataccttaggactaacctctgtattggatttgacaaaatcttaatcaaaaggcttttccttcctctctctctaagggcaatctttagtgtatttttaaaggaccagttactgcccccaggccccttcagggattcccatgaggacagaagggactaggcattcaggcctttaataccgtataggtttttaaagggtagtgggtccactatatcatctcaaaatgattctccaactatgcagacattgacatctgggctcagagacaggtgatgttcaacagttcaagcaaacattcaggtattttcatatttaaaaacagcttgaaactaggctgtacttgcctgctgaaatggcatccttaaagcacctacgttgacataaggtgcgactctacaagcttcaaactggctggcggcccctatgagaacacctgtaaaaagtacaagagaaaaataatgtgaggttaacgtttgtagcatttttcagggttccaaagggtacaagacagaacgaattcctttgaaaatggactattatctttctaaactgcatccaaaatttaaataaatgtaacttactcccaaactttaggactccattaacagcctttgaagattattaagtcaagaactattgtcatttttgaggttcctttttttctgtcattgtaatagtaatattcactacttctctctttgctcagactatcaaatgttccttgtataagaagcatacctttatggagttgattttcttgttttctacatttagctcttcgattttgaaaccaaacctataggttggagggggaaaaaaaataaaacctagatgttatgactaaaaatttttttaaattacaaaagtacaaagagaaaagagtcgtggtttagacaagaattgggagatacagcaagcaatctttgaattgtataaaacagcctcaaattccaaagttaaacatgtaaattaactacagaaatagaaagatagattttatagactttcacaagatagattactattagtcctgatttcatcttttcacataacagagtccccatggcctaaaactctgcttggtacctgataccaacatgataatggtttagatatttgcccagttaagacctgagaagaatgtgttcattaatagcctgtaatgttaattagcttcatcttaaagaaaaaccaaacaccagagcaaataatgactcctttgcggagaaggagttgtaagggttggggagaggtaattagtgtcataaaagcctcactacaaagaagtttagaatttctctgttctgctgtgcagcagagtgaaacacagtagcagaataattgtgcaccattatcatgataatctaatttgcttctttagaaaaagccactgtttgcagttaggatagtaggaaaacatctagaaaataactaaaatgtaaataaaagtatgaaacaacaataaagttcacttcttaagagaaaaaaagaagagcactcagcgaaaggagaatgaagtatatataaagcaagtaactcttaggtactttgttctcctggatgttacctgcttaaacttgacaacttttacaggcagtatgacagattttttaaaattcaaataaagcttgcttttgtattccactttcaataataaagcatattgattgactcacaaattaaagtttttaaaaccccattaaagtaaaaatactgcttcagagctttcattggtatgtttttgaaagcaagtgtcatagtcaatgtaaatcttcaaaaatttctctgctatttagtacaacagagggtggattttgtgccagggtggcatcctttgtgtaattcacatggcctgaggcttcttgcctttttttcccctagaagagttggaattaagatactaataatcataactgtaataattatcatcatgtttttaaggggttgctgagcctctggagatctcagtgcacagagcgaagcaggagaggcttaaaaaggaaggctctgctgctgatgctgtgatgaccaaggcagcctattattacttttcctcttcaacgtgactgctctgtttttttttttcctgatcctgttacaagatgtggggaagccccttaagaattgtgcatagttcgctacagatggtggtctctgtgcccagagaccgaaagagtatctgttacagcgatactttgtaacagctgcagatgtgcgggcctaaaactgctccatgtgttcaaaccaataataactatcattttattctattttattatctgagcggaaatacaatctgaaacatttaaatttgttccccctaaagctagaaggatatgtgtatgtgaatgtacacaatttgctcctttaaatgcccccaaagcctatttttgctattacatttgcctccacaaccaataaagaaaatctgtttcagtcctaacttcattgggtatggcacgtgctggagggcaggctttggaaatataaatactaatatatgtggtttgttttaaaatctaatgtatttagggtcagtttcgttgccttggttaaatgaatgaacaaagagtgaccaaaatgcgtttatttctccgctatttcacacacagtttgagatcgaccgctaacagcagactgtaaatttctgcacttaacagttactaattttctttatagtctgcacatctataaacctaattgggatatccgcttgacaaacctagaccctgcagagcagactttcaaggaaatccaactccagagaacaaaatactctttggaacttttaaggcatccagagataaaacgttttctgtgggatttttttttaagccttataaaagtaggcccattaggattaaaccacattaaagccagtgcgaggcaaggggggtgtggtttatagaaactctgggagaaagcccagcacagctttcttcttctgggaacatatgttaggatggaaaaaaaaaaaaggaggggagtgctataggactaagatctactttggaaaataagacctctagtaaagatatctctttccttctcatcttacaccagacactagaagcaccacctcccgagtgtgtcccccaagcctctttccaaccccaggctctctctgctccctgggccctcgacctcctggcagctgggtacctgcactcgggcctccgacaggcccagtcgctggctcagttcctctcgcatgaaggcgtcgggatagtgggtctcgtcaaaaagcctctccagctcattgagttgttccagggtgaaattggtccgacttcgcctctgcttgattttggtctggccttcgtcctccatccctttcgcatcctctttgcgatctttcagctccggggacactggagggggcaccccagcggggccacacgtgcatccacacgaacacacacacacacgcacacacacacggacgaaaacagcacagcaaatcctgttaccagatttgtcgcaaaaaagaatagagaatccttccccctcgtggaatcctggtccggcttctcaacccacccggaggaagaatatcccggagaagcgcaaaggtcaagtctgagcggccgcctggggcaaggtgggcagtcatccaccacctccttcacaaacgtacctcgactcaccgcctcactattcaccccccagtcaccggccttccccagcaaacaccaaatggtttccactcactttcgcactcacttgctccgcagcactcacagaaatcaaaggcgcagcgccaggcctctcacagagcaaagtctggacataagggcgcggcaaggccacccactggcctctcacaccggccattcccagaaggctggctcgttctcaggccagctctcaccaccgctggctctctgcctaccgcaaacttgctggtctaatttaggaacaattgggccgaaaggtatcagcgagagcaacagaccccggtgttgtgccgcacagggagccgcatccgcagacgcccctcgctgcccctgggctcgggccaaaccctgcataaggtcccctggacagccaggtaatctccgtcccgcctgcccgaccggggtcgcacgagcacaggcgcccacgccatgttggctgcccaaagggctcgccgcccaagccgggccagaaggcaggaggcggaaaaccagcctccggtggcgggcgaaagcaaccgctctttctgttctctcttcgccctccctcgtggaaacgcagactcgaccctaaacgcttaacccacagagatcaacaggttcaagcggaatattcgcgatcctcggtttctattggttgctcaaagccttttcatgcaaccagcagctcggatgtttaataaaatatgaatttttctgctctgggtttgcacacatccgttgccactttcctgtccttctcctccctttaaaaacaggagctcttctagtgtgagcatatacagccaccatatatatatccccctggaacctttatcctctgcgcccgaatcagagactccgggttttaagaagtcaaagctgagtttagatagtcgaggctgtttgcagttcttcccagcgcaggatccaggccagcatgggtgttaaaaatcatttccggaagagccggtctgcagagaaattaatacttgccctgagcttggaaatcaacaatcccaggaactgcgcccgccgggggttcagacctgaacctcgccgtcaggcgcgctggcgaacctgtagttcgggcctgtagttgtggactcatggccgggaggctgcactgggcaccttgacggtaactccaccactttacaaatttaggaagacctggtgctggtttggaggaagaagagtcgctagatctcggccctgccgggcattctagctacggtgatcttaaatattgccgtattttctagttctcagagttagttttgtggacatttgtcctttctttaggaaggaacattatagtaaacattatgggccaatttaatagcaaagtatttttactgatattgtattgaaatttaaatatgaaaacacacccttcaaattctgccaatgaggtgggaaggctttgtctattacatgtcatctacacagtggatgccactcaaagttttggggcttcgaggagatgtccaaatttcaagttgatccatagacttaataaaatctctatttttgtccccaaatttccaattactgatctaaacaggaacagaccgtgtcataaacaacttaattgcttgcttaaatatgtgattccacgcatgccacatattttcttaattggaaaaatatggcagtacaccagttactgcaggcaccaagtgccaaatcaattttattgttgaactcctttgaattggtatagaacgctctgccattgagataaagacgtttcctaacactgagctagcaccaaaggatttttgctctaagagaaccgagtactgggtgattgaaaacactaaaggaattgtgtaaatatagatccccacctcccccgccgccccccccccccgcccccaacacaccaagaaaccgaaacgcctcgcccgggagaagcagcgtagcctggacctcagctttcgttggcttccttctaccttgaaagagaatgggaagttttggcccctaagatccaaagattcaggggctctgcggagttcgaggggtcttggcggccccaaacacctaggcgaccggagggttaagctttccacctctgccccttctccctcccggcaaactctgcgctagaggctagctttagtcccgccgtctggttcagcaccccctcctgcagcccggccccgcgaacttccacgtccgcctgcgggccatccgggctgcgggcccatcctcccgctggtgaaaaatgcatttcggtggaatgggaacatctgggaagggcgcgcacaaaccccacacgcttccccccacgccacccccacaacacactaggaccccacccatgaccgagcataccaccggacccccacccttccactatcactctagctgacaaagctggggtccagggccctctccgtgtccctctcccctccccgctgggcctcggagtcctctcccgcccgagaggagtccggaaggcgggaaggggaaccgctgccgggggtcagtcaggtcgttaccctccgtcagtcgcgggctgcccggctccctgcttctctcggcggcgcccatgtccagctcccggacgggagagcgccctcctccagctcctccgcctgctcctcctcctcctacacctcctccgcctcctccgccgccgcctccgcctcctccgccgccgcctccgccggccgcccggactgccgggctgctgcggtcgtcgcggcccgcctcggtgcagccggtcggctccttggccccgcgcagcggcccgctctccagcacctcccggtacgtgatcgcctccttcttctccttcactttctggtcaaaagacttggagacgaacgccgtaagttcttccatcgccgccgcacgtcagcccggcgctcaacctctgccagcagagccccgctctttttttccttcttctttttttactgctccagcccccccaataataacacatcaatgggacaggaggtgggggaggagagggaggaggagaaagaagaagaaaaagaggagaagaaagaagaaagaggaggagaagtagaaggagaaaaagaagtaagaagaggaggaggaggaagaagaggaagagggggagaagggtgaagaggagagggaggaggaggaggagaagagaaggggcgggggctgccggagggaaatgggaactgatgcttccctgccggagcgcgcttgttcaatgttaagatctttgacaattcttcctgcggagagttcagatctgatagcgacgctgcgcttgaagtcccactatttatacttcctaacggcggcctcttgttttgagtaaattacctcccctcgcaactcggagtgagcccccttcccgggtagcagtcgcgcctctaccgggggttggggaggggaaaaggagagaaacagagagagagagagagagagagagagagagagagagagagagagagagaagaggagagagagagattggagttcgggcgggctggggctggagtggtagggcagcacagggggaccggagggggcggggagagaaggccggtccccggccgctcaggttttcagatagcccctgccgcctgtgctcttggccattaatccaggattgacaagaatccctaattaatttaattaggcgtggattttgcgttggtgtcacgacttagttaaacactggggagctggatagaccccgcggggtggggccaagaggaaactgacaagtgcgcagctcttagagtcagtcaggtatcccgacactgcatccttccctacagccttgcttcgagtcagggtgcctcgcaatgctcagcttcgcattgcttttcctcgtccctgccctgcatcaaccgcccagcagtttacaggccccgcatcccattcccgcatcctgaccccgcatcccaattctgcatccccgcctctccctcacaatcccacccctgccggccgtagctccaccgcccagcatcatcctgcccagagacagggttgcctgcaccttctccgacccgcgcagcttctcttaggagcttcccggctcgcaggcaggctgagtccgggtcttctccaagctcctcgcccctcggtccgtgttattcgctctattattcgtgtcctggagcccagctgactcctctatggacagaccccgctaaaagggaccagtcgatttaacaagtttccccagcagctgttagctgacagatctcattttaaagtgtttccttagcgcccggtcaaggacagctcgacttcgttcgtttcctctctgaggtctcagaactcccacccttctcccttactctctgcactcggacccctctatggtgaattacaggacttcttctttagcatcttgggaaacatccgagtttatttactaatttgaaaaacaagagattatccctcttcgagtctgaaaaaaaaatcgacgttaagtttgtaccccctctaatttcatttattacggagagctaaaaaagagacgctc

SEQ ID NO: 545 - DNA, 351152 bp, Homo sapiens
  source 1..351152: mol_type = genomic DNA
tttgcctttagcttcattactttttttgtttattattttttaaattgacaactaaaaattatatatacttatggtgtaccacatgatgttttgatataagtatgcattgtaaaatggctaaatcaaggaattaacctattacctcacatactaattttttttgtggtgagagcacttaaaatctaatcttagcaatttccaaatatacaatacattgttataactatggtcatcatgctgtacaatagatctcttgagcttatgcctcctaactgaaattttgtatagctatgttacttttaatattaaatgtggattctgtaaaatcccagtttttacaaaatgtattaggagtaacataataagagcctcataaattaattttttcagaaagaaagctgttcatttacctaggacttttatttaaaatacatatgttctttgaaatgaaagaaaagctaatgtttctccatttattctaacttacaaattaagctgtaaaagaaaaccacaatagaaattgcgtaaattacccttaagaatcagccaatttttaccacatactttcatttggtacaccttaggtttccttatgtttccattcacatactaccattacataaggttttacttttttttttttttttttgtctttgagcccttcaagtgaagttaccattgaaaatcaaacaatacctgtccagtgttgtaaattaaatatcgtgtagtttgatatcatatacctgcctttccatatcagcctttcattaattataagtacaaacaccaaaataattgttatcaagccccacagtagtttttaacttcagttttcaacttaattctcattatcccatacttttaaacagaaaaaagttttagtacatatattacctggaagtaattctaatctgttccaataactaaatagctgaggcttctgggttagatatggttatcttctactgttcaaatttttaatacaaagcatgaatgttaaatttgtatataacattattacaaaatgacactggtaacatgaaatcagaacaacattctttcccgagtacctagtacttacccacaaggcattgtagatttcttttcatttaaagagtggataacaatcttggagtagataacaatgaaaacctagaaaaaaaaacccacctcctgtttttattgagtcaaacaagcagaactttgattggaaagtcccatttcatatattacactggtagtattttcttctaacgaaaaaaaaaaagcccttgtgccaccaccttgacatgtacttaaacgtttacccaaatcacttaggcattgcttctcaaacttggctgcatagcagaattgcctggagggtttttaaaaacacaaatgcctatgtctcactccctgaaattctcctttaattggtacgaggcggggctattctaggaactattttctatcccttggcaattagccatctgtatagtatttttaacttcctacgtgttattaactgtaagactgtttgaattgtcaggtctttgtggtgagctgaattctgcatggcagtgcttactgtgcagaaaggttgcaatgcctcactttgccttaatccatgttcctctaacttccttactctttctctcaagaggaggcaagtggctgtggcggccgcagcagtggctgatcatcactgaaaataccaaagaaaagaactgagctgcctccttcatattttttccattgaggattaatttaccgtgctttttcattttctctacatcctgcaaaagtttttttctctcctaagaaacaaactatgaactgattgttgaaaaaaagaagtaaaaagttttagcacagcttctctgtctcttcgggacaagttagaaaattctgaagtgagccgaagcatagtaagtgctttctttctttttaagctacttctggggagggaggaggctattgtaatggtaaatttcactccgagaggaagaaagggttgataatcaatcaaaaatgaggtattcctttgagtatttgtgattttcttactatattgtaagatgcttttaattttctctgtaaaataggcagaaatggttttagtgtgtgtatgtgtgaaataaaagctcagaaaagcaatcttcagagcgccactgaaggaagttttgacgaacggagtagagatgtataccacttgggggcttcagtgagaacccagaattcctggaggaggatttacattcagaaatgttgaagtgaaaattccttctggttcagcatcttggagttcagcttggaagaacattttacgtatggaagaatttgcttctccaaacctctcttttggccattgtgtgtcctgaaggatgggacaacttgtgctgtagaagcactgcttgcctgagtttgcttcaggcattttaaatttaacttgagggatcatgtgtttggcatgatgaggaccactgaagacttccacaagcctagtgccacattaaactctaacacggccaccaagggaaggtacatttatctggaggcattcctggagggaggagctccctggggttttactctaaagggtggcctggagcacggagaaccattaatcatctctaaggtatgtttctttttccaatattgcctttattcaaattgtttttttcaacttgtcagatttgtcaaaaatgcaaaataatgagaactgccttaatataacttaatttgctgtttcatgcctttctgattatctagaaatattttggatagcctgggatttgaaagaaaaatgtgtctagctcatttattctatgaaatccgaagaaaaatatgcctgtttgatggataatcttctctttttgtgaatgaaatcgcatacaatcagttaccacatgagcttttcagttataaatcagattaaagattaataacatggttaagatggtggcatggtatatatttgtgcattcaaaaatatctgctttttctctcttcaactgaaaatagcatctaaaaatattttaagtttgcttataattctggataatagattgcataaataccatgtgttgctttttttccccacactcagaaaggagaattaaatcagctttcagcataactcaagatcaaaacatttctgcctctcctatttatctgtatatttgaatccctttttaaaccttagtcatcctgcagcatacctcaattcttcatttatcttttggtgtgggtagtcataccaatgaaatatttatgtactggggttaatatttctatttttctcttaaactacagattaacattacttgttataatattgcttttaaatttttagagtatttaatagtctgatacaatagattataatggcttttcacacatgtgcattcatcaagaaacatttgtaattaagggagaaaaaatttttaatttgagggtgggaagaaggtaatatggattgcatttgagctctgttattggttcaggttacttttcatatccccagaaataattccaaaaggttatttttcaaattactgaagtaattcttactgtggatgagccagggagaactgggtttcacagtgataagccacgagtgcacgggacaccattataagttgtatgacttttccttaactttcttaagtaaaacaaaaggatgtgcatatgtgtgtgtcagttaggaaggcttccccctgtgaaaaaaattcaaaaccgagtttatagtggctctcagtaaattggggtttgtttttctcatattacaagaagtttggaggtagattttccaggcaaggggagcagcagctcaataatgtgatcaaggaccccacttatctctccactctgccattcttatgatgttggctttgtcttcatggttgcatgatggatcccacaactccagcattgattgcatcttcattccagacaggtttttggctttttgtttctcattagacctttgctttcatctcattaaccagaactgtaccctgtgcctgtctttaggccaatcactggtaagaaatgccagtgattaatacagactgattaggatttctttcacaggtttctacaataaggacctactcttcctgaagtcaaggaatcattgcccactgtttgaatgatttgaggttctttttgcaggaagaaagagggcatggttgctgaataacagataattctgcaatgaacataaatattgtctcggcatttaaaaagtctagttgtacacaatttgcctgtcccttaatgataaaatattctgtatctatacactacagtatctgacagtttgctgacagaaaggtctaatcctcccactaatgagccagcttctctaagcctccattttacctgcagaatggggctatcctactatctactttaatgggttgtgtttaaatgcaaccatgcatttaggttagtgtctagtacacagaaggagcaaagattatgattattgcttttcattattctagcagacatgtgtagtaggagacaggtctggctgctgtaaaaagatccaaaataacaataatataggaatttatttctctgacataacagtctgagcataagccaaaccaaaagatggctctatgatgtcagggacccaagttccttctattttcttacttccatcctggagtgatatctcatcttcatggtccaagtgacttgccaccacatctgctttccagtcagtaagaagcagggaagagggaaaagagaaggcaatctcctttctttcaaggatccaatctggtccaatgtgctctgtccaatatggtggcccacagtcacatgtgactatttctatttcaattaaaggtaactaaaatgaagtaaaaaattttaaactctgtttaaatgttcctcatttgcacttgttgcattccaagagtcgtactgttccgaagctcttgaacatcttcccccatgttgtctgtctggcaaactctttaaagctccatttcttcttctctctgaggttttcctgatgtcacccaagttgagttccgtggtctcccttctacacttccatattatgcatgtattacattgaatcataaaattttatttcgttgattgccttctcagaagtctgtgagcctttttagggcagggactattttttttttttcatctctatcacatctaaatcagagcctaggtacacaaatgtttgttgagtatatgaaagggcatggctgtgtcttactcattttgcattttcaggatctagcacagtgcctggcacagagtaggcactcaataacttttactgaattaataagcaaaagaccaaacagaaccaatgaggatgccaggcagacctccatgtggggcatgtattagtttcctattgctgctgtaacaaattactacaaacttatggcttaaaaacaacacaacttacagttctgtaggtgacacacctcacacagatctcactgagctaaagtcagtgtgtcagcagggctgtgttccttgctggaggctctaggggaagatgtgttttcttgccctgtctagcttctagaggctgcccacattccctggctcatggtccccttcctccatcttcaaagtctgcaacagcaggttgagtccttctcaccctgcagctgacctctgactgcctctctctttcacttttaaggcctcttgtgagtaccttggacctaccaggataatcctggataatctctctattttaaaatcagctggttaatagccttaattgtatttgcaaccttaattcacccttactaaataacctgacatattcacaggtttcagggattagaatgcagacatcttaggggagacagggcattattttgcctaccaccaggcatttgagcattggtagaagtctatgtaattaaggcagtaccagggatgagactaaagtgaaatgtggtggctgatcatgcgtatactagatcttctctctaagacaatgaaagaaaatgcacattagctcatacactgctaaccagatgtctactattctcccaagttagggtgaccctccattgtaggggaagggaagggatagtacacattgagtcacacatatgaaaggcacaaacacattatacaaggcagctataaactgccaggttatggatggcaatataataaatgaagtatcatttttctttagatataaatgaggcaggagaatgaatggccgtaaaggatctacaaagggtaacaatagaataaatcatttttgaattgctttctttgggatttaatatccttggaaaggaaaggtggggttgtggaaagcgcctctgtaatctgtgaacttcaaaaagaaagggtaacttttaaaaaattgtcattgtaagtggatgctcaggtaattcaatagtccaggaagttggtggcatgattttattatgattcacttactctgtattgtggctcagaaaagcagttccacctgcagaagagatgcacctgctcccagggctcataagccaagtaacaacaataaacaacaacagcagcaactgccggtacttatttagtgtttgtgatgttccaggctctattccaagagatctacgtgttcacccatttaatttccacaacttcacagagagggtaacactcttatcccaatgttatatgtgggacacgcacccagaattaatttgagtaacttgctgaagctctcatagctactaagtgatgcagtcaggatttgaactcatgcattctggttccagagtccatgcgcctcacaccctatgccattcagtctccattgcctactgaacatttggctctctctagattctagagctattatctgagtgaagtatgggattgatatttcattatataagtttttaaatctattcgggggaattttaaaaaatacatagtccaataagattccataaaataggtctgactactgctcagtcaactgctttaagtagttcaagacccataaaataaggggacacctgctgttcttggcaaatatattcatggtgtctccacctgtagaggcatttctttgtgcttttcaaacatggacttcagaatttaaaggtaggccactgccctggtctcttttgtctcttacatcatcaacactcagcaatgtgctggtcaaagcactcctccatcagtgcttatatttctgatttctactcccctggaaggtatctgtgctctagctggactatctctatgccatctcattataaatcttgctggttccatcttccacactgtcacctctccttctccaaaactgcttcctccacctgtaatatcaccaccttttttctatcaatccaaatcttagcctccttgtccaccaagacttgactcactgactctatttcatcaacagctttccattctttatctatggaggcgagggggaggtgcttaaggctcattttaccagttcttcagccacagtcctgagttcaatttgtttttttttttttttttttttgagacagagtctcactctgtcgcccaggctggagtgcagtgcagtggcgcgatctcggctcactgcaagctccgcctcctgggttcacgccattctcctgcctcagactcccaagtagctgggactacaggcgcctgccacacgcctggctaattttttgtatttttagtagagacagggtttcgccgtgttagccaggatggactcgatctcctgacctcgtgatccacccacctcggcctcccaaagtgttgggattacaggcgtgagccaccgcgcccagcccctgagttcaatttgaaatggatttttaggcagttccccaagacctggatctggttgaggacccaaagtcatctttttcgtctccttccaactaccacattagatcagctcgtcattctgaccttttaaaatagccaatcctttctgactttttccctttcttgctttttcctttaacatcctttgcccttcctactagggtagcctcatctctctgctgctcttcagctagtttgtttcttcccttattgttcaatctatctttgtcctgcctttgcattcattcttctttcctcttatctccccagtggctttattttttattttaattattattttttgtttttgagatagagtttcgctcttgttgcccaggctggagtgcaatggcacgatctcggctcactgcaacctctgcctcctgggttcaagcgattctcctgcctcagcctcccaagtagctgggattacaggcatgcgccaccacacccagttaattttgtatttttagtagagacggggtttctctatgttggtgaggctggtctcaagctcccaacctcgagtgatgtacctacctcggcctcccaaaattccgagattacaggcgtgagccaccccactcggcttcccagtggctttttattatacaggtatataaaggtcctataaaggtagttgtttgcatttggcgtcctgccaataaattgtactcgttaaggccagatgggttttactcatgctgtatatatttcttctcttagcaaaatctttctcatttacacatagcaaatgcttaataaatgttaaatgacttacaggattgtacagctataggaaaattagcaatcatgtaataactttcttcgtacacagagagaaaactgagatgcaaaaaaagttgccaagatggtttcagtcttagcaaattgagagtatgtgtgtatctgtgtgtatgtaaagccccagctagtaaggaagtaattgctttctctgattgtgccctttatagttttttttttttttttttttttggagacagagtcttgctctgtcgcccaggctggagtgcagtggtgcgatctcgggtcactgtaagctccacctcccgggttcacgccattctcctgcctcagcctcctgagtagcagggactataggcgtccgccaccacgcacggctaattttttgtatttttagtagagatagggtttcaccgtgttagccaggatggtctcgatctccttaccttatgatccgcccacctcggcctcccaaagtgctgggattacaggcgtgagtcaccgtgcccggccccaccctttatacttttctatgaatcctagctcccctgttagactgttaccttccagaagctaaagacccttcattgattccttttctctctctctctccccttcccttctttccttcctccttttctttttattattcgtggtgcttaaactatacgtaacaattatgaaaatgaaaatgtgaatgaataaagaggaagataagtattagagaggatattcttaaaaatctttgttagaagctacctaggccagtgtgcacacaggttactagaaaaacctgtttaaaaactaaggcaagcaggttaagttgggctcagtctgaccatgtctttcatatgcacatatgtaatgtttggtaaatgtctgttgaattgaattagattgagaaaaaagggaaactcatgtttttctttaacttttaaacctttaaaaattaactattattttagttaaagtcttacgcattttttagtacaaattaattttgatatttcctatcaatgttgttggaaataacttttattcaagtagcatgctgacatgctgtaccaaatgggtcttagcatcagtaagaactctgctttctttcacagctaatagattcccaaggctttgccttctatgcaggggacacaatttattttaagaaatattcatctcattttagtgagcccacagtgtgattggagaggcataatgagagactttctatcaatttttgaaaaaacaaaacctcaaaggacatgctggatcttaactaatccatagacagactcttccacatctctccctttgatgtagttccaaacagtgaacatcttatccaaagggctgcagtgcagagtccttgttctcccacttggttcatcccaggagtccatccatctcttgtgctctgacatcccaggcacttctcaatgaaacaaaatgaggcaaagattctctactaaatctaagcactgtttctccccctcttctaatgactttctccacaaaggctacatgggtacgctgtggatcttggtttgtagaatggaagtgattcttttctgccttcagaggaagctttcctgatttggcagaccgatgtacagaacactctgtcctgggcatctgaacctgaatttgcacttatgtcaactacattttttcattcctcaatatctatttgttttcttctccattttcagcagtatttttttcttggagatttatgagattatttatttattttgagacaagacttcattctgtcacctaggctagagtgcagtggcatgatcacagctcattgcagccttgacctccctggggtgagcttcttacctcagcctcccaagtagctgggattaaaggtggacaccaccacacccggctaatttttgtagaggtggggttttgctatgtttcccaggctggtctcaaactcctcagctcaagtgatctgcccacctcaacctccctaagtgctgagattgcaggagtgatccaccacgcctggcctaaacctttatttttgaatgctctttggtgcatgtatattaatttatatttgtaatttctatgttatatatatgtatatatgtatatatatattttcattttaagtgaggttttccagcatagaaaaaagcttacatcccagacaatatagggctctgagtgggaataaacaagttttatttctaccctagcttttactggctatgtgaccatggcaagtaacagccttcttgaacctcagtttccagtttcctcatctctctttctttctttttttttttttttttttttttttttgagacggagtcttgctctgtcgcccaggctggagtgcagtgacacgatgatcttggctcactgcaacctccacctcccgggttcaagcgattctcctgccttagcctcccaagtagctgggactacaggcatgggccccatgcctggctaatttttgtatttttagtagagatggggtttcaccatattggtcaggctggtcttgaactcctgacttcgtgatccgcctgcttcggcctcccaaagtactgggattacaggcatgagccaccacgcctggccagttttctcatctttcaaaggcaccaggcatggtggctcacacctgtaatcctagcactttgggaggatgagtcaggtggatcatttgagtccaggagttcaaaaccagcttgggcaacatggcaaaaccctgtctctacaaaaaatacaaaaatttgccaggcatggtggtgcatgcctgtggtcccagctactcaggaggctgaggtgggaggatcgcttgagcccaggaggtggagattacagtgagccaagattgtgctactgcactgtagccaggtgacagagccagacattgtctcaaaaaaaaaaaaaaaaggaacattcttacctaatgaagttgttataagtatccaacatagtataagctatgcaatagtgctttgtaggtatccagcataggtaggcaactcatatgccaaagatgatacttggctgattttctgtatcatggccagcagttgctacctcacactgaaacactgaacagattattccctgccatcatagagcttatattccaacagaaggggactggcaataaacatgtttgtatatgctaatttcagggtgtggtaagtattattaagaaaaaaaatacccaatacgatatgttccagagtgatagtgtctgtgaggtagaggtatgccacatggtgattagagaagggttttctgaggagatgacatttgagccaagacctaataagaaataagaagccagacatgcaaagaggtttataagttgggctgaggtaggagagtcttagaaagttctagaaacaaaaagaaagtcagtgttattggagtacagtaagcgagagagtagtatgagaaatggaaaggtaggctgaggtcagatcacataaggccttgcaggctgtggaaaggaccttggactggatctaaatgcagggtgtgagggtagatcgcaccaagagtctttctctattcatggtgaaatggacagacccatggcaggtacttaaaccctgggaggtttttagtactggctcttaaagccaccttcttcctccctctcatgtacatttctaaggtacttcctgggtctacaacaggacagggctttccaaaagacaactgttaaccaaaagacaactgtcaacatcatagtaacttagggaatgatgcacaaagaaacagtaaatactctctttgctgttgggagagttttccccctccaccccataactcttgatctcttgggttatttttcactctcaattgacaagacttcctgggttgcttttatcaccgtactgtcagtaacttgactgaggtcctgctctgtaacaggcatgctagctcatgtaagcattgcaaaactctgggaagtcctataggtggagagactggactcttgctgaaggtcataaaactactaaggtacacatctaagacctttttaactttcagcctgaaaaatttctttcaaagtaaaaactgcgttgtcactttgtgatgccaaagaacccttccatctatgttaccccatatcttgataaactggtaaaaaaaaaaaaaaaaagtggaatgcatgaactgtgtgcaacagtcagtcaacttggtggcatccttaaggtgccctgctcggtgaaatggcggcggtgggggatgcacatctacttctattaacactgggagttcaactgggctctctgcatcttcccaggtgctgcttcctgctgctttttacttctgctagactctgaccactctggttgtttgggtggggtatatcccatcacatggataggccatgaaaaaacctcaacccccaaggcctggtactcaaggagaaatactagacgaacattagatggtttaaagctaacagggactgaaaccagttaaaagagggaatcagacataagttgcaaactgatagaacaatgatctgctggggcacatgaggttcatgcctcccgacatgctgatgagccccggttatgagctgggcaccacaactgatggtcttttatgaaggagtgctctttacaccaaactttatctcattttggttgtccctttctagcccttgcttagttcaaaatgtagtacatctgctgtgctcatccagcttcatctactgctgagttggctgtgtccacgctcaatctgtctgctctggtttcatgatggtcactagcattcactttccctgcaaggcctactcgccggctttcctaatagtacactctcttggcacgatcctgggaacttcacgtacagttgttaccctcaaagccattgctacctgctagggtcttggttcaattggcctcatctctcactcattcttggttcctggaaacctggtacagacagatcctagtattctaaagatctcaaaatttaaaaatcattgtgacatgaatttgaagtcaaaacccaggcaatttaagtggaaataagcattcttcaggttagtcaaagtgcttagcactttgtatattaaagtgtatcctgagccacacatttgctagaaggtaagaagaaaaattggactctagaatcaattgcctttctcttttcctttgaaaagttaaaatttttaatgaaagaagttgtgtgggtacaatgtaagcttttatcatcttgcatgtgtcctctgagaggttcacatttttgaggccttgtctcatggaaactgggaaatgagcttctggaattcagacccaggatctggctgcattccagaaataaatatacatgttgggcgttgagatagacaattaaaagaataggagagtgtgcaaacttttgagaatgagaaggcagaaaatagactcttttctctcatgctttgcttttgcttttgtttattttttatatttttacttttgagtatcagctagtgagtagcagggcaaaaacaaggcagccattgatctaagtgtaaggcagcaggaggaaggttaagagaatgagtgttattctttaggactacattcatagttgcatggtgttgctcttggctcaaagtctacaattaaatcagttgttggcactcccttgaaagcattactatcacagtttcccctacatatgtaagtcaataaatttgacctttaagaaggacagttggtgtagaccccctccactgggccaacacatattgcaaatttctgaactcaggccctgcaaagtactactgccaccttgcttctttaacagagaaggcaaaataaacagaggaggattccatggtataaaaaagaaaaaaatacattatttatatttaaataaataaaattatttatagagcattatttatatgtgtcagtctgctgtgggtcaggtactatgttagattcttttatttattattttgtggaatgagatttgtttttatatatgaggaaagaggtttttcataaaagatggagccaagatttaaagctaactcatttcattcattagttatcatatttagtcaacacatcatttattgagtgcctaaaatctgacagcactgggaaacaacagaagatgaggtcactgcaccctaaaggagcatgttctcgttttttcttcttataccactgcaactgacccgtccacatttcctcaccttcatttctgtgtgcattggctggacttccagctgtcagcatctgcaattctttgcttggaagccctttgccacagtaatgacaccaagagcaaccctccatgaccaactggagttggtacgtaagcagcttagttctttcatctctcagatgggatgactctaaggtgtatgttttccactagcacctagaatttcttcagaatccaactccagttgcccacagttgtagctggcttgatcaaacatctatgtcagctgccttcccttttctacctcatgttcccacttccttgtcagctttctttacccccaggtaaactacttgcatttgaagtcttgtctcagggtctgtttctgaggaaatccaaactaagatgaccaccatttagagaatgcttactaagggatagccagaccctaaagactaatgtagatctatctgtttccaaaatctgtgatctttggagcattgcactgtactatggaattcaagcggaaggaatcccatagaatcttacacttaatcttttcttgggtactaaggaaagtggaaatccatccctagacaggatattttgtagttctctctttcggtcttcaccctctcatgggatgggtgtgttttctcttttctccacagaattgactgaaaagtctcattctgcttttatcatcacttcatttctctgaatgaatcaagcatctctgaatgaaatcaagattttctccctcccgtctgagagtaggatccactctcttgttctataggttctcttttgttctataggttaagggttaaggaaaatgtgacccccttgaacagaatagatagagaaaattattcatttggggatctctgaggagagaaattcttttctagaattttatttatattgcttcttttcttactcaacttatactacaacatagactaaaaagaaaagtggatacataactgtttttttaagtccagaatatttgacaatataatgtggtaatggtgtgaagttttacacctaagcaggcaatagaatatgacacagtttccgacctaccctgcccttgaaataacagaataactttttaacactaacatgcgtttccttgaataacttgtacctctgccaaattccacacaagaagcttcttttcttcaggggctgcttccccacaatgtgaatattctttgactcactatgttgtccatttccaatttccttgttttttgcttgagttcactgaagactgacaaacagtagcttcacgtgacagccattagtctgctttaaacctcagcttgatcttgaatggatagaataatgaatagattttgtgtcatataattcatgttgtcagttatatgaaattggcagttaaagagaaactaaatatgcttccagtcctctcttttctaaattcatatttgaatataataatgtgaaaggcattgttccttcttttagttaaagcatttttgtagcagtctgaactgtgaataatagagaaacatatgctctattaaaaaatagaaggtgaggaagataagtgttttactctttgtattaagaattaacaagtggttttaaaaattgagcttgtatgtgtgtgtgagcacagggaggggtatttcatcataatgagggaggccttggcaacttagtgttcgttttaactccattgattgccgaacacattcatgcctgctctagctccagggaggctgtggaacaggaaataagagattcaaaaagcagcacagaagaaaatcatctcctctccttccatctcccaagcagagaaaaatatgctttcttttttgtcaaaattgcttggtttgtcctattatgctgtcatttcagagagattaaaagtatactttttcatacattgcaagtgggaatgtaaaatggtgcagccactttggagaaacagatggccatttcttaaaatattaaacatagagttaccatatcacccaacagttctactctgaagtatatacccagcagaaataaaaacatatatctgtacagagactcatactcaaatgttcatagcctcattgttcacaatttttcataaatagaaaaaatccaaatgcccatcaactgaataaacaaaatgtggtatagccatataatggaatactatttggcaataagaaggaactgagttacaacatgtatgaactttgaaaatattatgctcagtgaaagacaccagacacaaaggaacatatttaactccacatatatgagatacccagaaaaggcaattctaaagggacagaaagtagatgaaagattgcctaaggctatggataggaatagagagtgactataaatgggtacaaggtttctttttgaaataatggaaatgttctgaaactaggtgttctgaaagtagatagttgccaactctgtaaatatagtaaaaatcaatgaatcataaagaaaaacactacttctattctggtaacaaaaattagaagaacaaaaaaagacagaaattatagtaaaccacaaagtaaattattacccaccatgttaaccatttagtattgatttttttttttttgagatggagtttagatcttttgcacaggctggagtgaagtggcacaatcttggctcacagcaacctctgcccctgggttcacgccattctcctgcctcagcctcctgagtagctgggattacaggcacctgccaccatgcctggctaatttttgtatttttagtaaagatggggcttcgccatgttggccagactggtcttgaactcctgacctcagatgatccacctgcctcagcctcccaaagtgctgggattacagatgtgagccactgcactcagccagtattgatttaattaactgaaatttaatatagtagaggaaaataaccaaaatgaagctctaaagcatgtcacagagtcctaattattcaaagaatcataaagatgtgatttacaccattcaataaactgcaaaaaatttgtgcagaatcaaagaaagcaggcacaacaacgtatattcttaattatttcatttatataaatttttaaaaccagtcattggtgaaagaaatcagaccaatcattgcctctgtggttggagactgactagggcacaagggatgatgtgcgctagtgcccttttgatgcatgaaagttgtaaatttctgggatgatggaaatgttctatatcttaatagtgatatgtgctatgtggatatatgcatttgtcaaaaactcattgaactgtttccttaagatctgcacattttactgcacgtaagtcatgccttaaataaaatctgataccttaaataaagtgagagacaggaagaaattggctattggaagcacaaaacaaaattgaaagtttagaaatggacccattagatatataataatttagtataggatgaaagaagaatttttaaaggtttttttagaaacagagtctcactatgttgcccaggctagagtacagaggttattcccaggcacaataatggtacactgcagcctcgaactcttgggctcaagccatcctcctgcctcagcctccgagtagctgggactataggcgtgcgccaccatgtctagcagaaattttaaatcagtgagggcaaaaagggatttttaaataacaatactgggatcaggaaagataaaagctggagtcatttcattcctaacaccaaaattaggtcagatgaataaaagattcagatagaaaaagtgaaataagtttacttcagatatttatgtattgtttggagacttttatagcaaatacattttaaactttttgtggtaaaatatacataacataaaattaaccattttagccatttttaagtatacagttcagtggcatcaagtacattcacattgtgtgcacttacttatcaccaccatccacctccagaacattttcatcttcccaaactgaaactctgtatccattaaaaaccaattctccattccttccagtccctagcccttagcccctggcaaccgccattctactttctgtcttcataaacttgattagtctaggtgcttcatataagtggaatcatacaatatttgttcttttgagactggcctattttacttagcacagtgttttcaagattcattcacattgtagcgtgtgtcagaacttcatttattttaagggtgaataatattccattgtatctgtataccatatgttgtttattcatttatccattgatggatatgtaggttgtttctgccttttagctattgtgaatagtgagctatgtacatttgagtttaagtctttgtatagatatgtttttgtttttgagacagagtttcactcttgtcatccaggctggagtgcaatggcacgatctcagctcactgcaacctccgcctcccaggttcaagcaattctcctgcctcagcctcccaagtaactgggattacaggtgcctgccaccatgccgagctaatttttgtatttttagtagagacaagttttcaccatgttggccaggctggtctcaaactcttgacctcaggtgacccacctgcctcggcctcccagagtgctaggattacaggcgtgagccaccgtgcccagcctagatatatgtttttaataagaacttgtgtgtacagatattttggtgagttccttctttcaattccatggggtctatacctagaagtggcattgaagaatcatatggtaattctaagtttaattttataaagacctaccttactgttttccacagtagctgcaccattttactttcccaccagcaatgtgcaagggttctaatttatacacatccttgcaaacgcttgatattttctatcttaatttttctctaattaattttcttcttttttttttaagagacagggtcttgctccattgtccaggctagagtggtgtcacatgaccatggttcattgtagtcttgacctcctgggctcaagtgatcctcctgcctcagcctccagagtatctgggactacagatgcatgccacaacacctggctattttttttcattttttgtagtgatggggtctcactatgttgcccaggctggtctcgaactcctggctttaagtaatcctcccaaagtgctgggatgagccactgtgcccaataaataatagcattcttaataggtatgatgtggtatctcattttgtgattttgacttgcatttccctaatatttagtgttgctgagtatcttttcttgtgcttattggccatcaatacatcttctttggtgaaatgtctgttccagccctttgttcattttttaaattggaatatttgcttttggttgttgtattgtagttttttatgtatccttgatattaaccccctatcagatgtgtgatttgcaaatattctctcccattctgtggactgcctttttactctgcggatagtgtcttttgatgcatgaaagttttaaatttggataaagcacactactttttcttttgttgtctgtgcttttgatgttagattcgagaaatcattgccaagtccaatgtcatgaaactttcctctatttttttctaagagttttctagttttagctttgacatttaggactttgatctagttttaatttttgtgttcatgtgttttctttatgagatggagttttgctcttgttgctcaggctggagtgcagtggcaccgtctcagctcactgcaacctccgcctcctgggttcaagcaattctcctgcctcagcctcctgagtggctgggattataggcgtcaaccaccacacctgactaatttttgtatttttagtagagacagggtttcaccatattggccacgctggtctcggacttctgacctcagatgatccacccgccttggcctcacaaagtgctgggattacaggtgtgagccactgcacccagcctaattttcttatatggtataaggtaagggtccaactttattatttggtatgtggatatccagttttttcaacacatatttcctactgaatgatcttggcactcttgtagaaaattatttagccatttatagccagagttgatttctggactctctctattctattgtattggtctaaatgtctgtctgtatgccgttataacactgttttgattactgtagctttgtactaagtaaattttgaaacaaggaagtgtgaaacctacacatttgtcttcttaaagtgtttttttcttagtacttggggtcctttaagattccacatgaattttaagataggtttttttatttctgcagtaaatgtcattgggattttgatggagattacattgaatctgtagattgttttggttactattgatatcttaacaatattttcttctaatccataaatgcagagtgcctttcagtttgtgtctgctttctttcagcaatgatttacagttttcatgcatgctttttgcctccttggttaagtttattactaagcattttattctttttgatgctattgtatatggaattttttttatttcttttttgaattgttcattgttagtgtatagaaatgctaatttttgtgtgttgatttcgcatcttgcaacatcactgaatttgtttattaattctaacagctttttttggtggaatctttggaggtttctacatataaaataatgtcaatggagataattttacttcttcctttccagtttggatgacttttatttctttttgttgccaattgctctgactagaactttcagttctatgttgaatacaagtggtaaaagtggatatccttgtcttattcctgatttcagaggaaaagcttttagtttttagccattgagtctgataataggtgtggaattttttatatatgatctctattatgtcacactttaaaaaaatctatgaaagtatcaaaagatggataaatatttacgtatttatacataaatataaataaacatttatatcatttgggggaaaagaatcttaataaccaaagccaaaaattataagggaaagaaaaagatgatagatttaattctgtacaaaattgaaaatatttacctagcaaaaacttcattaattaaaatgatataataaatagggataagatccttaatactgtataaaaagaactcttatatatacataaggaaaaatccacacacaaaagctacattggcaaaggacatgagcatgaaattcacaaaaaagaataaccaagggtcaaagaatatatagaaaaagagtttatcttctctagtgattacaaagaaaaatgaaattagattttttttaacctgtaagactgaaaaagatgaggaagagtgataatattcactcaatgtagtaatttcatatcctttcagtaggaataaaaattggttgagtcttttttggaaggcaccaagtattaactcttgaaaacgtgcatccccagcaactgtagttgtccctcagtatcagtgaggaattggttccatttggtaccctacaggtaccaaaacccatggatgcttaagtctcttatataaaatggtatagtatttgcatataatctacacatatccttttgtacactttactttttattttttaattttttttgagacagagtctcactctgtcagcaggctggagtacagtggtgcaatctcggctcactgcaacctctgactccctggttcaagcgattctcctgcctcagcctcctgagtagatggaattacaggcatgtgtcaccactcctggctaatttttgtatttttagtagagaacaggtttcaccatgttggccaggatggtcttgatctcctgacctcatgatccacctgcctcggcctcccaaagtgttaggattacaggcataagccactgtgcccagcccttttgtatactttacatcatctctagattactcatgatactaatacaatgcacgcacatcacttcatttgcatggattcaacatagtacttgtacacatagtacacacagcaaattcaagttttgcttttcagagatttgtggaatttttttctgaatatttttgatttgaggttggttgaatccatggatgcaggactgatgcacatgacgaacatactgtgtatacctctgggtttatgctaaggaaataattgctcaatagatatgtacaagtatgtttagctatatatctaaaagagcaaaaacttcgaaaaatctatcaactatgtctatcaactatggggccactgaaaataatgatgcagattatcgatttatagatatacatgtcatatggtttgtttcatgcgcgtccgtgtaaagagaccaccaaataggctttgggtgagcaataaagcttttaatcacctgggtgcaggcgggctgagtccgaaaagagagtcagcaaagggtggtggattatcattagttcttataggttttgggataggcggtgaagttaagagcagtgttttgcaggcaggggtggatctcacaaagtacattctcaagggtggggagaattacaaagaaccttcttaagggtggcggagattacaaagtacattgatcagttagggtggggcagaaacaaatcacaatggtggaatgtcatcagttaaggctatttttacttcttttgtggatcttcaggtacttcaggccatctgggtgtatacgtgcaaatcacaggggatgcgatggcttggcttgggctcagaggcctgacagtttggatctgtgtccccaccaagtttcatgtcaaattgtattctccactgttggaagtggagggaggtggttagatcacaggaatggatttctcatgaatggtttagcaccattaccttggtgctgttctcatgatagcgagtgagtgagctctcgtgagatctggttgtttaaaagtgtgcagcacctcctccctcactctctccttctcctgctccttccatgtaagatgcctcattccccctttgctttccaccatgattagaagcttcctgaggcctctgcagaagtaaaagctgctatgcttcctgtacagcctgcagaaccgtgagtcaactaaacctcttttctttataatttttttttttttttgagatggagtctcgctctgtctccaggctggagagcagtggcactatctcgactcactgaaacctctgcctcctgggttcaagcgattctcctgcctcagcctcccgagtagctgggattacaggcacgcaccaccacgcccagctaatttttgtagttttagtagagacggggtttcaccatgttggccaggatggcctcgatctcctgacctcaggatctgcccgccttggcctcccaaagtgctaggataacaggcgtgagccaccgagcctggcttttcttttctttttttttttttttgagagggagtctcactctgtcgcccatgctggagtgcagtggcctgatctcggctcactgcaagctccgcctcccaggttcacgccattctcctgcctcggcctcccaaagtgctgggattacaggtgcccaccaccgtgtctggccattttttgaatttttagtagagacagggtttcatgtgttagccaggatggtctcaatctcctgacctcatgatccgcctgcctgggcctccccaggtgctgggattacaggcatgagtcaccacgcctggctgcacccggcttttctttataagttactcagtctctgacatttcttcatagcagtgcaagaacggactaatacaacatggaaagatattatatattcatattcatatatttttgagtaagagaagtaggttgccaagtaacatgcctagtacaatcccagttttatttacttacatgtttaaatatttatttttgacaaaatttgggagaatatgtatataaaagtattaaaactgattgtgtctttgtagtgggattttaagtgattcatattttcctcttttgtatctttttctgaagtctctacaatgaacatgtaatcttgttagagtaatggttttgttaaatgataatattactttttcagtagcgttgagtacattgttgtgcaaccatcaccactatctggttccggaactttttcatcttcccatactgaaactctgcactcattaaacagtaattcccctttgcccctcctctagtgataatagctttaaatcaagaaaattctacatttaataattttattttttcccccttcccaactacacatatacttttaagaaaagaacagttttattgagatataaatcaaatgccatacaattatcctgtcacacacatactttggaagttctgtgaccctctttgtagtttgtttgtttgtttgatggaagcatttttaccaggcagaaagtacaacgttggaagtgaatgttcttgaatttattggagacaaattatagaggaataatgatatgtgaattttacctaccataaacctgcatcctgtatttggacaggagctctgtgtaccttcaaaaactgttcaaaactggttttaggtccagctccctgtgaaagttgagttaagctaaagagcaggaatctattaacaggtcaacagcagcaggggggcggggattggaaagggcctggagcagctgcggttcatttgggagtttaaaattggcttttcttttattctcttattcctgctacctccatagaatccaggaagaatagggatgttttttcctacatttgattataacaggcccaaatctctttgaacataaccagtaaaggaaagaagcatccgtggccatcaaactgggtaaaatggtaacataatctctgatgtgtagtttgaatcctattaattataattgtgtagaattgtacagtgagaatgctttgggagtttttaacgctaggtttttcaaagactacattcctcattagaccttccccattaaggcatgcttgagtgatgctacacagccgaatagttgggattttttccccctcttgtcatagtctgaagacaaaggattcttccgcttgccaaagttccagggagcctaggttgagccgctgtgacagcacttcggcagggagctttttattcagtcttcgatttgccgtcaggcctcattcacgaaacaggatcaagttggagcagtacacggagaaaaaaaaatcaacagaggaaaatctcgcacagccagatatggcgccatgggtcactttttcctttcactaatgctgagtcatgatgcagtctaggctaaggcacagaaaactgtacatttctggtcctaactgcattgttgtccctcaggattctcggtgcctttgctaaagtaatgttacaacagtccagaaaatgctagcattagtattgcagcttacttgacttctctgagaagcagcgagagtggcacaaaagagctgggagccctgcagttgataccaaaataacctgccaatggccttacaaccttgctacttctcagtttttcctagcctcagtttcctcgtctacaaagtatggataatgtgctgctgcttcttatttacaaggttcttgtgaggatcaaacagaggtaatgcatatgaaaatgtttgttacattacccaggaatgattcttattatcatcagaatttttatatttgaatttagaagttgtatgtatgtgatcgcttctggattatgtgtgtgtgaacttcacacattatcaaaagagattacttttttaatattgtttgcccaagggaaagtgttgagggctacataagtttaaaaatgactttaacttaggcattagatataaaatggtctccccatttgccttcaattcagtaaaaacagcatatttgtgattggctacatcaacaggcatccttccctcttatgtataatctggtatagcatagtgattaaaagcacaagctgtagagccagatgcacaaacacaacatttttgtgttgacaaaagacaaagacactaccaccgttgcgacctttatgtatcttactatctaaggtttttaaatccatattacatctttacaccatcggttgtttattagtttattagagctggcaaaacaaaatgccgcagactgggtagcttaaacaacagaatatttttttcacagttctggaggctagaagtccaggatcaaggtgtgagcaggtttggtttctcctgaggactttgtcctaagtttgcagaggctgccttcttactgtatcctagcaggtctttcctctgtgcccccacatctctggtgtctctctgtatatccaaatttcctcttagaagaggccactagtggtagctcacacctgtaatcccagcaccttgggaggctgaggctggtggatagttttaagtccaggagtcaagaccagcctgggtaacacagtgaaagcccgtatctacaaaaaaaaaaaaaaaaattagccaggcatggtagtatgcccctgtagtcccagttacttgagagctgaggtaggagaatcacctgattctgggaagtcaaggcagtagtgagccataatcacaccaccactgcactccagcctgggtgttggagtgagaccctgtttcgaaaaaatacaaataaaaaaaatttaaaaaaaaaaagaagaaaaagcaattagattgtattagggcacatcataatggctttattttaacttaatcacctctttaaaagccctatctctaaaaagtcacatctgagacactgggatttagggcttcaacataggaattttgggagaacatagttcaacccctaacataatgctctctactccacagataatgcaaaattagccaagggaccaggattgactctagtatcatacaaaagagtcaaaggcaattgtgagtctagtagtaaaatttatttgaatatctcatgtggtactcacatcaatcatataaaagacatctgacttttatggagaaactcagactttcatggaaaatcatagatatttggcaataatttttggcttagtccataaagagtttggaaattagaatttggggttgtgtcagaatacggaaacagaattcacactagttgtttcagcagaggaaatttaatacagagaataagtataaagatatttactactacctgcttaccagatgcaattttgcatgatattctaaatgaagcagacacatgatagtttgtggcatgtcaagatgatcaagaatatgacagtgcaggagttgacatagttctgagacagcagtgtgaaggtatgctgttgtcctcattaggtgaaagcaaaaggcttatggtaattcttgagaattttttgaaggggaaaaaaatgttaagatcaatagctaagtactacatgcgagatacttgtattgctttgctcaagttatcacatctggaacagcagttgcaattggcattacttgattaagtttacaaaaatccatattcactgtccaagatgaataaatctgcacaggccaaattaaatgggaatgttaggaatcacacctgtatcttttaagtctttggtggtggcattaatcttgacagttcttccaagggtgtgataattgcttttagtttaccattaggataggacaaaaggagttccaagggcttccacttggccctcctacagtattagctctttctctacatcccagtgtggaaattagatcatttttaaagcatgttggctgggcacagtggctcacacctgtaatctcagcaccttgggaggcgaagatgggcagatcacttgaggtcagaagttcaagaccagcctggccaacatggtgaaaccctgtctctactaaacatacaaaaatgcacacctgtagtcccagctacttgggaggctgaggtaggagaatcgcttgaacccaggaggcagaggttggagtgagctgagatcatgctgctgcactctagcctgggtgacagagtgagactcagtctcaaaaaaaaaagcatgtctacatatagtctacatatatgatacattaaaactatagaaataactatagggtagatcctataagatagacgagcccaaacttcatttaccacttgatatggtttggatttgtgtccccacccaaatctcatgttgaagtgtaatccccaatattgggggagggactggttatgggtgactggattatgggggtggattttccccttgctgttctcatgatagtgagtgagtgctcatgagatctggttgtttgaaagtgtagcacttccttctttgttctctctctccctctccctctccctctctctctccctctccctctccctctccctctccctttccctctccatctccatctccctctccctctccctctctccctctcctgctctgccatggtaagacatgcttgcttcccttttgccttccaccatgattttaaatttcctgaggccgcccagccatgcttcccatgtagcctgtggaactgtggatcaatttaacctcttcttttcataaactacccagactcaggtagttctttatagcagtgcgagaatggactaatatggaaaattggtagagaaggggggcattgctataaagatgcctgaaagtgtggcatcgtctttggaacttggtaatgggcataggatggaacagtttttagggctcaaaagatagtaagatgagagaaagtttggaacttcctagagacttagtgaatggttttgaccaaaatgctgatagtgatatgtgatatggacaatgaagtccaggctgaggaggtctcagatggaaatgagcaacttattgggaactgaagtaaaggtcactcttgtgatgctttagcaaagaggctggtggcattgtgcccctgctctagagatctgtggaactcttaacttgagagaaatgatttagggtatctggtgaagaaatttctaagcagcaaagcattcaggaagtggcctggctgcttctaacagcttaggctcatatgtgttcacagagatggtctgaaattagaacttatatttaaaatggaaacagagcataaaagattggaaaatttgcaacctgatcatgtggtagaaaagaaaaacccattttctgggaaggaattcaagccagctatggaaatttgcataagtaaggaggagcccaatgttaatagccaagacaatggggaaaatgtctccaagacatttgagagacctttgtatcagcccttcttatcacaggcctagagtcctagaaggagaaaatggtttcatgggccaggtccaaagccccactgctctttgaagccttgggacctggcaccttgcactgtggctgctccagctccagccaaggctaaatggggtcagggtacagctcaggccattatttcagagactgcaagtcccaaaccttggcagtttctacatggtgtttggcctgtgggtgcacagagggcaagtgttaatgcttgaaagcttctacctagagttcagagtgtgtatggaaattcctggatgtccaggtagacgtctgctgcaggggcggagcccttatggagaatctctactagggcagtgcagaagggaaatgcggcatcagagtccccacacagagtcctcacttgtgcactgcccagcagagctgtgagaagaaagtcactgtcctccatacctcagaatggtagatccactaacagcctgcactgtgcacccggaaatgccacagtcactcaacaccagcctgtgaaagcagctgtgggggccataacctgcagagccacaggggtggagccacctaaggccttgagagttcacctcttgcatcagcatgacttggatgtgatacatggagtcaaaggagattattttggggctttaagatttaatgactgccctgctgggtttcgcacttgcatgggacctgtagcttctttgttttggccaatttctccaatttggaaagggagcatttacccaatgcctgtaccccattgtatcttggaagtaactaattttttttttttaattttataggctcataggcagaagggacttcctagtctcagatgagactttggacttggacttttgagttaatgctggaatgagttaaaactcggggggactgttgggaaggcataattatgttttagtgtgagaaggacatgagattttggagggggcagggtggaatgatattgtttggatttgtgtccccacccaaatctcatgtcctattgtaatccccaatgttgggggatgaacctgatgggaggtgattggatcatgggggtggatttctcccttgctattctcatgatagtgagtgaattctcatgagatctggttgtttgaaagtgtgtagcacttccctctttaccttctctctctctcctgcaccaccatggtaagatgtgcttgcttccccttcaccttttgccatgattgtaagtttcctaaggccttccagctgtgcttcctgtagagcctgcaggactgtaagtcaattaaacctcttcataaattacccaatctcaggtagttctttatagcagtgtgaaaatggactaatacatcacctgaacaccataaatgttctctttggctactgatccccagtggtgttttgagtgcctgaactagcattcattcacaaccattatatagaattcttcaaggatatatagaatctttaatttctctcaataaaaaggtcaaacttcacttgaatcatattagcaagtttaatccacattatttgtttatctggagagctagcatatgtctacatatgtatgtatgcatacctatttattccaaaactgatttaaagtgtgcacttatctaagaagttgtagtagccaaggtggtacactgctcagatgttacttcaggagaaactgcttcaaggaacataattgtcagacagtttccagctgttacacctttggatctgctgcagtgtttatgccaaggccatgctcaccccaggctgctactagccaatagctgaacatattggggtatgaaagccatgccattctgcctgatgcctcttacagtaggcaatctttgctccaggacttcccatcagcctggccaagactttctcagaatcacactgcaggccgaagctccttttcctcagtcctcctgccttccctcctggctttctctctcccctttcacaggtgtcagatccacattgtgttcaaagagctctcttctcctatttctgatacctcacttgtttatcctctgtaggtgtttctcctaatacatctcttgcacatctggttccaccttggcatctgtatctttgaggacctaaacagacacagaaatcaagtaacaatgcaaaaagcctgacgctcactgactattagattgttgacaaatataagattgctgggccttgggaaagcataatttcacttgttcctaataactgaaaatgctttttgaaaaactaaatatgccatgcataaagggcctaagatttaggttttcctgtagaaaaacatctgtgccctagtgggaaagtatcacttttaaatataaaattttaaaatgaatccagggaagacattaaattcccaggattgaggacaataaccaagaacctgaacagcatttacgtgtttgttggtctctgctttctttatcttgccctctttgcttcctgctttatgttataaagtgttaatgtgtcaaaaatgaaaaatgtagggttggtgtgatgttctcaacaggcttcttgaaaaatatttttttcatctttcaagaatcagctaaaattgaatttggcattgtttgccctttgttgcctaggcattggggtcagactcttgtctgacctaagtgaagccatgatggacagttctgtagagggcattatcacagcctaatcagataaactgaaagcaaaattgtttttctctctcccacagaatctgctcctccattttcttcctcttttatattcttttctaacttgccctgtgaattttcaagacatagtaagattttattgttattactgagatagattggttgcagaaactgttgtatgaaccaaatgtcttctgccttgtagatagacttcctcaggaactaagagcagtgtctgtacgcctcaggtaacaagtcactgccaactctgtaatacgttttaacctgatgcagaagtaggggccctgctgttttctggattctttagccttttgttcaatgtaataatgcatttaatcatgggagaatttaaaacatttaccttgtaatagtagcaataagtctaagtcccaaatcaatagaaacctggcaaaaaatactcagactaaacaaaattaccaagaacaacgacaaaaaccaaatcctaagagccataaaggaatcccttttttgtacatgtttaattttacattttagcaaaaataaaaaataaggaagcaataagtttaggtttgggctgaagatgcaatgaaaatataggcttatgagaaagtaaaatactaataaaatagtattttgcttctctgctgggggagtaagtgaaggaaactaatatttcttgcatttatgctatgtgccaacccttgtgctggatgctttttatatatattatcttggccctccccagaacccagaaaagttttttttttttttctagacagggtctcactctgtcacccaggccggagtgtggtgactcaatcacgactcactgcagcctcaaccctctgggctcaagtgatcctcccacctcagcctcccgagtagctgggatttcaggtacatgttatcagacccagctaatttttttaaaaatttttggtagagatggggtttcaccatgttgcccaggctgctcttgaactcctgggctcaagccatctgcctgcctctgcttcctaaagtgctgagattacaggcacgagccaccatagccagctcccatgtcatcattttgtcagtgagtaaactgaggcttagataagtgaaataagctgcctgaaatcgcatgcgtttgtggtccctctgggattcaaacccagtcctgtctgactttaagttgtggataaagaatgattttggaactgtgaaggctaagcaaatactggtgagagggactaactcacacatgagacagctaaataatgaagtacatacagtctagagcaagcaaagacccaggctagtggtaatcactccctatgtattttgccagtcctaaccagagtctgagagccccttacaagtgaagtcactgcaactgcaattggtgatctttcaggaactaagtgaggaaaaggaggaagcatggaaagacttgagatgaagataagtagtcccaactttcacaaacccgggtataacttcaataatttctgttgcctttgagacatgttgagccctcagttgcctgggcttgagggaagttagtaccagaactcagagaaaggacttggttataaggctgattccaaggagtgcataaaactttctaatatctgatactggaaatgggaatgaagagttcagtcttgatttaaactagctccattattctaggaggtgggacataaggaaatatagacagcagatgacatttgaattaacataaggggcatagaatggcaagcagcctgttgggagccagaccagttaagagttaaaagacaagattcagcccactgggaaagtgtgctgttaactacaagtcagagtaataggacttcatcagaagggctggaactaatttttgcctatcctcttgaccaagatttgacaagagtgacggaagaggaaacattctacatataggggacattcctacatattgctagtagaaatgtaaattaatacagtacctacagagagagtatcttggcagtatctgttggaattacaaattcacattttctttaacccaacaagaccacttttaggttttgaacttgtagaaatactcaatgtacacagtcatgtatatacaaagacatttctgcaggattcttgaaaagggcaaacaaattatagaattccttgtctcttgactaggatttttgtataggttttataattccctcttagggctttcagtagttaccacttagctattatttttataataaatgagtttatttttaaattattatgttaattcataattattatgataattaaagccaaaattgtattatatataaatatatatacatatatctaaatatttacacattagtttaagcaagattatgttgttaaagctattttcagtttaatgtgatacagtgttttgtttgttaatagtgattcagttaaggcagatagccatatcaaaagcatttgatggcctggcgcggtagctcacacctgtaattccagcactttgggaggccaaggcaggtggatcaccagaggtcaggagtttgataccagcctggccaacacggtgaaaccccatctctactaaaaatacaaaaaaaaattagccaggcgtggtggcaggcgactgtagtcccagctactcgggaggctgaaacaggagaatggcatgaacctgggaggtgcagcttgcagtgagctgagatggtgccactgcactccagcctgggtgacagagcgagattccatctccaaaaaaaaaaaaaaaaaattagccggacatggtggtgtacacttgtaattccagctactcgggaggccgaggcaggagaattacttgaacctgggaggcggaattgcagtgaaccaagatcacaccactgcactccagcctaggccacagagtgagactccatctcaaaaaaaaaagagcatttaataagcatttcaatttttaaaattaaggaaattttggttttgactataggtcctagtcaagtctttccagaactgatatggccaacctctgttgagcaatgtggatgttagaagatggggagccagtgagggactgcaggttaagggatgtgtagtaagctgttaggagcaaggccacctaagtccccccacttaaattcccagtcgtttcatttcctgttttttctttttgtccccaattgtctttttttttttgagacagagtctcactgtgttgtgcaggctggagtacagtggcgcaatctcagctcactgcaacctctgcctcccaggttcaagcaattctcctgcctcagcctcctgagtagctgggacgtcaggtgcatgctgccacacccagctaattttttgtattttagtagagaccgggtttcaccgggttgcccaggctggtcacaaactcctgagctcaggcagtcgacctgccttggcctcccaaagtgctgggattacaggcgtgagccaccaggcccagctcccagtgtcttaatgtagtactctaggtggatgagaggattggggtcaggaaaaaagtctggtaagtcaaagaatagagctgggtttgatttgaaaagacaagataatggacagtttttaagagatagagctttataggaaggaagattgagatttaagacgaaatatgtcaagaatgggtcagttaagttctacctggtatatcagatctccttctttaaagcttcactcttcattgacatacacagacagatttaaacaatttaaacaaaaattatagctaactcttaagtacttaatatatgcccaagcttaatgctttatatgcattaactcactgatttcttacacctctatgaagtaggtcctattataatccccatttaacataaagttgaggaaagaggcctatacactaagtgatttgaccccagacccatagctattcactatactgtgtctctctgtctacctcatagggtttctgtgagaatcaagtgagttttgtgtgtgaaagtactttgaaaaccacaaagcatttgatacttgaaaaccagttctcaagagatagaaaatgttattcactctactctgtggaacaattctttaaaaacaggacttggaaagcaagctactgtcaaaactaaaataaaattaacctcaaattagaggagcacttttagatgacaaaataagtactaagaaaatacaacaataaaaagaaaaaatgacatacaatcaagatacaagactaattgtaatttttaaaatggccttttttgatggggtgagagtttttcacagagctgaaagctgtgattgcattgccacattttacaaaacagtctctggaacaggattgacctggctatcaaaggataattacatggcctaatagattgtccctaccttcaactgctaatgaagcccttggaaaatgtatcccccacttaacgaatgaggctgaaaatgccaagaagccttttgccaaggatgtgttctctaggctcaggctgaattcattattttgttagagtattaccaccaagccaaccatgggcaatttagcatgccacatttcaagcagaatttaattcatctctgtgtgccataaatgagacaaataccctgtgatcaggtgacagctgtcagtaatgccataaacagaaagtattaatgtaagtggtgaattcctcttaatcatacccccattaaaagctggtacaaaaattagggggtgtgtgtgtgtgagagagagagattgtgaggaaaggcatgcataaaatagtctgattactttacgatactcaactccacttttgttataaaacctcacttattttcataccaaaaaacaacaggtaaatttcttgatgaaagaaagtacctctgagttaccctttgtctgaaaatgtatgtctttttatggaattgcctagctctgaagatagctattgcttataaagactagtttgttcttcctttctttctttttttttttttttgagatggagtctcactctgtcgcccaggctggagtgcagtggcgtgatcttggctcactacaacctttgcctcccgacttcaagtgattctcctgcctcagcctcctgagtagctgggactacaggtgcacaccaccacgcctggctaattttttgatttttagtagagatgggttttcaccatgttagccaggatggtctcgatctcctgaccttgtgatccacccaccttggcctcccaaagtgctgggattacaggcatgagccaccgcgcccagccagtttgttctttctttaagaccacatgctttccttaatgtagcaaatctaaaagcagggacatttggaatgttactcaaagtgggagggagtcctaccacccagggagcctgacatcccagtcagaaagtgacatatgaatgtattaagaatgggcccaacatctaacaataaaaaaaatgggttaccttaaacaccattttttgaacacttactgctcccaggctctgaacatctgaagaaacatctgagagacaccaaggatgcagtgagaatcttttttctcattagatgtaagagcagctctcagttcttttgggcatcagagttacctaggaagagttgggggttgtattttgcagtctctggagtcagactacctggttttacatcctgtctctgctgtttgttagttgtatgatcaagggtgttacttaccctcagtaagtctagtgcttctgtttgtaaaaatgaaagggggaatagataaaaatagatctatcttattaagtaaagatggactgatataatgcctggtgcagtttcaggcatatggtgagcatgcaataaataaatactagctcatttattattagtagtagaattatgtttcttctcctacccagagtgagacattaattgatcaaaatgtgtcatacacctcatgtggattggggcaaaacaaaaaccaaaagagaaacacagttttgtgcaataatttaaatctcttaaataaaaaatgtagagaagttgctgttagtaaaatgtactgacttttcattctttattaattcaatgatatttgttatcaaatattataataaatgctgtttgagcccaagtataaatctgatttgtgacttgccttcaagaaccacagtcttgtcatggagaggagaggatgttatgattgggaagcagtggtggggcactagaaggggtgggtcttctggagatctgacaaaattccatttcttgacctgggtggcagttctataataataaagttatgcatctatattatatgtactttttggtgtatatgttatagtcacagtaaaaatgtctttaattgtggtatgtgagtgatttgtatctcagtttaaaaaaattatatgggatattcctgaataaaccttggggaatgtttctttctttcttttttttttttgtgataagagtctccctctgtcgcccacgctggagtgcagtggcgtgatctcagctcactgcaacctccgtgtcctgggttcaagcgattattctgcctcagcctcccaagtagctgggactacagacatgtgccgccatgtccagctaatttttgtatttttagtagagacggagtttcaccatattggccagactggtctcaaactcctgaccttgtgatccgcccaccgcggcttcccaaagtgttgggattacaggtgtgagccaccacggccggccaggaatgtttcttagacaaagcatcaaaagcacaagcaaccagcatatgttaattagcttgatttagccattctgcaatgtatacatattgaaagcaacaagttgtacaatatatacgatttttatttatcagtaagaaaaaaagcacaagcaatcaaagttaaaatagacaaattggactttattaaaattaaagacttgtgcttcaaaggatactattgagaaagtaaaaatataacctatagaatgcaagaaaatatttgtaaattttctatctgataagagtctggtatctagactatatgaagaattattatgactcaacaatgacaaggctgggtgtggtggctcatgcctttaatcccagtgctttgggagactgagatggaaagattgcttgaggccaggagtttgagaccagcctgggcaacatagtgagaccccatctctatgaaaaattttaaaaattagctggacatggtggcatgtacctgtagtcctaactactctggaagctgaggtgagaggattgcttaagcccagcagtttaaagttgcagtgagctatgattatgccactgcactccagcctgggcaacagagcaagactctgtctcaaaaaaagaaaaaaaagaagacaaccccattttaaaatgggcaagaggtttgaacagatatttttccaaaaaagatatataaatggtcaataagcacatgaaaagatgctcaatatcattaatcaccagggaaatgcaaatcaaaaatacaatgaagtatcactttataccctctaggatggctgtactcaaaaggacagacaataaaaagtgttggccaggatgtgaagaaattaaaactctcacacattgctggtgtgaatgtaaaatggtatagttgctttggaaaacgactggctatttcctcaaaaagttaaacatagaattaccatgtgtcctagcaattccatttctatccaggaaaaattaaaacataagtccacacaaaaaacttgtacatgaatgtttatagcaataacaaaaaagtagaaaaaaaattttcatcaactgatggaaaaataaaatatggtgtactcattgatgaaatattattcagtcatataaaagaatgaagtactgattcatgctacagcacagaggaacattaaaacgttatgctatgtgaaagaagccataaaggccacacattgtataattccatttataagaaatgttcagaataagcaaatccataaacacagagagagtattagtggttgtcagggactatgggggaggatggatgggagagtgactactagagggtacaggacttaattttagtgtaataaaaaatgttatgaaattagatagtggtaagattgtaagactgaatatgttaaaaaccactgacttgtgtactctaaaaagctgaatattctggtaagtgaattattatctcaataaaataaataaaatacaaagtatgggatagttccatgctttgtaatggttatatttgactaaattatagattgtacaaagagagtaatgggaaataaattttaaaatataaattgaaatcaaattataaaaggctttattagtgagaagctgtcagtagagaaccattaaagatttctgaggccaggcatggtggctcacacctgtaatcccagcactttgggaggctgaggcaggtggatcaactgaggttgggagtttaagaccagtctggtcaacatggtaaaacccatctctactaaaaatacaaaaaacaacaacaacaaaaagccagacgtggtgatacatgcctgtaatcccagctacttgagaggctgaggcaggagaattgcttgaacctgggaggtggaggttgcagtgagctgagatcgcgccactgcactcctgcctgggtgacagagtgagactctggctcaaaaaaaaaaaaattttttttttgagaaagtgaggaatgtgattagagcgtggttcaagaaatttagtctagcatcattttgattcatctctgcgtctttcctagcctttgtactagagaggacagtgattatgtactttgtagcttagttttgtcttagggaatacatatgattttagaaatttttcaaaggactggatcatattagcctggtaaattgaattatatgtcgttttgtaataatacaatgtatatgaatatatacaagcattacctcatttcataggaaagaggtgatagataaaatgagaaaaagcgagattttggttgtgtttactaatacatatttctgatttggagaactgggaagggaaaacataactgtattagtctaagtctcaatgggttgctatattagaataattcactaagggttgtcaaggactgtgaaggatctgagaattgaccttaccagcaagctaacaaattaacctgccatagtttcatgaatgctggcagaagacacaagacttttgggtcagagataaaggacttttgcattttatcatagttgatttcaactttagttagtggaagagttaactagttacacaatttttagaaatgtaatcaaattagtacttgaaagctccaatatatttattgtaaaataaaatattcaatgcagaagttgcataaaacctgtttctcacattgctttttgaatacatgcttaagggacatttaagagtctatggcaaatgttggctctttggattgaaaaccacaagctaaaaaagaatattaaggaaatccaaagcaaatcacttgatttataccaagcactcaattttctcaacacagttcttcagaagacagtttcagtaaattgtgttaaccacagattcattgtttacaatagctttcattaatgtaacattccacagtagggaaaaaaattttacaatgagtgagaaaacactctgtaattaattctcctagtgttttctacaatattccaagagatctgtgtggatcacaaaacaatactgttttttaaaaaaattctgttctagaaatcacatgaaacaatcctacctgtaactgcaattgtattttattttatttaaatctgatgaactgcatgggcatacaacacaatgtgagggcaattgtgccagcagaatatgtctatgatcaggcagtatgctgagaaccagcaggtgggggaaaatgagacttgggggactacagggaatgaatctggaggcagcagcaattttttagaataatttgaaaaccctttgttttgaaggatttggttacctaattaggttagagaagcttgtgtgctttgtacacaaggagagatgatctctatgcttttcctagactctcaaagccatttgtgttaattatatgacctccactaagcactcaaggtctggcctatgatatgttttctgtactcttccaaatgctcatacattcattattaagaaacttggcttcagagcatcagattactgcatttcttgtaaaccagcttagtggcaacaaaatccaattcatctctagacattgggttttcttagatgagctcttctatttttctgtcccttggttaaagaagagctgcaaataggtctgcagagctacttggttatcagttttacttactatcaaaagatctgactgtataacctttgttcttagatatttgctgtgtgtaatttattttattttttggttactaaaacattttcctttttcttaagcagaaatagcacatgactaagaattagaatatgcagtctctcctttcatctcttaatccctcacatataacctgatgcattaagataatgcttttgggaatgtgctatgggtttcaacaacatgtgtgactgctaatgagctgggataggcttggctatgatttctctaaggctggagttcctacgagtgtggagaaatacatattaaaggattaaagatataagagaatgttcatgaactatatcttaactagttcttgtttttaatttatttattttttgagacagagtctcactctgttgcccaggctggagtgcagcggcctcatctcggctcactgcaagctctgcctcctgggttcacgccattctcctgcctcagcctcccaagtagctgggactacaggtgcccaccaccacgcccggctaatttttaatatttttagtagagatggggtttcaccgtgttagccaggatggtctcgatcttctgacctcgtgatccaccccccactcggcctcccaaagtgctaggattatgggcgtgagccaccacacccggcctatcttaactagttcttatggctgaaataagacagagagactgggaacatttcctaaccaaaataggatttggttaaactttgtatgcggtaagaggaaaggacagaccctcttagaaaactcagaccattgccccttgcctcaagactgcacataacataatcctctttctgtttttgcctgaattgcccagatgctcaaagccattcataatgttcacagtgactatattaatttttaaattttggaattattctcatgattttttatcatatatacatatatattgtttgtataggtggtatatgtgtgtgcatatatatagaaaatatatacatttacctataattgcttttggaaacaagtgagatatcaagaacatgttaaagaacagatgatgtgattttgtggctggcaagatggccgaataggaacagctctggtctgcagctcccagtgagatcaacgcagaaggcaggtcatttctgcatttccagctgaggtacccagctcatctcattgggactggttagacagtgggtgcagcccatggagggtgagcagaagcagggtggggcatcgcctcacctgggaagtgcaaggggttggggaactccctcccctagccaagggaagtcatgagggactgtgctgtgaggaatggtgcattctggcccagacattatgcttttcccatggtctttgcaacccacagaccaggagactctcttgggtgcctacaccaccagggccctgggtttcaagcacaaaactgggcggttgtttgggcagacaccgagctagctacaggagtttatttttcataccccagtggtgcctagaatgccagcaagacagaattgttcactcccctggaaagggggctgaagccagggagccaagtagtctagttcagcagatcccacccccatggagcccagcaagctaagatccactggcttgaaattctcgctgctagcatagcagtctgagctccacctgggacactcaagtttggtggggggaggggcatccgccattaccaaggcttgagtaggcagttttcccctcacagtgtaaacaaagccactgggaagttcaaactgggcagagcccactgcagcttcacaaaaccactgtagccagactgcctctctagattctgcctctctaggcaggacatttctgaaagaaaggcagaagccccaggcaggggttgataaataaaactcccatctccctgggacagagcacctgggggaaggggcagctatgggtgcagcttcagcaagcttaaacattcctgcttgccagctctgaagagagcagcagatctcccagcacggtgctcgagctatgctaagggacagactgcctcctcaagtgggttcatgacccccttgcctcctgactgggagacacctcccagtaggggatgacagacacctcatataggagagctccggctggcatctgacaggtgcccctctgggatgaagcttccagaggaaggaacaggcagcaatatttgctgttctgcagactctgctggtgatacccaggcaaacagggtcttgagtggaccttcagcaaactctagcagacctgcagcagaggggccggactgttagaaggaaaactaataaacagaaaggagtaacatcaacatcaacaaaaaggatgtccactcagaaaccccatctgaaggtcaccaacatcaaagaccaaaggtagataaatccacgaagatgagaaaaaaacagctcgaaaaggctgaaaattccaaaaaccagaacgcctcttcttctccaaaggatcacaactcctcgccaacaagggaacaaaactggatggagaatgagtttgacaaattgacagaagtagggtacagaaggtatgtaataaactcctctgagctaaaggagcatgtcctaacccaatgcaaggaggctaagaaccttgaaaaaaggttagaggaattgctaactagaacacccagtttagagaagaacataaatgacctgatggagctgaaaaacacagcacaagaatgttgtgaagcatatacacaagtatcaatagctgaatccatcaagcagaagaaaggatatcagagactgaagatcagcttaatgaaataaagcatgaagacaagattagagaaaaaagaatgaaaaggaatgaacaaaacctccaaaaaataggggactatgtggaaagaccaaacctacatttgattggtgtacctgaaagtgacgaggagatggaatcaagttggaaaacactcttcaggatattatccaggagaacttccccaacctagcaagacaggccaacattcaaattcaggaaatacagagaataccataaagatactcctcaagaagaacaaccccaagacacataatcatcagattcaccaaggttgaaatgaaggaaaatacgttaagggcagccagaaagaaaggtcgggttacccacaaaggagagcccatcaggctaacagtggatctctctgcagagaccctacaagccagaagagagtgggagccaatattcaacattcttaaaagaattttcaacccagaatttcatatccagccaaactaagcttcacaagctaaggagaaataaaatcctttacagacgagcaactgctgagagattttgtcaccaccaggcctaccttacaagagcttctgaaggaagcactaaatatggaaaggaaaacccagtaccagccactgcaaaaacataccaaattgtaaaggccgttgacactatgaagaaactgcatcaactaacaggcaaaataaccagatagcatcatactgacaggatcaaattcacacataacaatattaaccttaaatgtaaatgggctaaatgccccttaatagaccgattaaaagacacagactggcaaattggataaagagtcaagacccatcggtgtgctgtattcaggagacccatctcatgtgcaaagacacacataagctcaaaataaagagatggaggaagatttaccaagcaaatggaaagcaaaaaaggaaaagcaggggttgcaatcctagtctctgataaaacagacttcaaaccaacaaagatcaaaaaagacaaaggcattacataatggtaaagggatcaatgcaacaagaagagctaactatcctaaatacatatgcacccaatacaggagcacccagattcataaagcaagttcttagagacctacgaagagacttagactcacacacaataatagtgggagactttaacaccccactgtcaatattagatcagtgagacagaaaattaacaaggatattcaggacttgaactcagctctggagcaagctgacctaatagacatctacagaactctccatcccaaatcaacagaatatacattcttctcgcaccacatcacacttactctaaaattacctacataattggaagtaaaacactcctcagcaaatgcaaaagaacggaaatcataacaaacaatctctcagaccatagtgcaatcaaactagaactcaggattaagaaactcactcaaaaccgaacagctacatggaaactgaacaacctgctcctgaatgactactgggtaaatacgaaattaaggtagaaataatgaagttctttgaaaccaatgagaacaaagatacaatgtaccagaatctctgggacacagctaaagccgtgtttagagggaaatttatagcactaaatgcccacaaaagaaagcaggaaagatttaagatagacaccctaacatcacaattaaaggaactagagaagcaagagcaaacaaattcaaaagctagcagaagacaagaaataactaagatcatagcagaactgaaggagatagagatacgaaaaacccttcaaaaaatcaattaatccagaagctggttttttgaaaacattaacaaaatagactgctagccagactaataaagaagaaaagagggaagcatcaaatagatacaataaaaaatgataaaggggatatcaccagtgatcccacagaaatgcaaactaccatcagaaaatactataaacacctctacacaaataaactagaaaatctaaaagaaatggataaattcctggacacatacaccctcccaagactaaaccaggaagaagttgaatcccttaatagaccagtaacaagttctgaaattgaggcaataattaatagcctgccaaccaggtaggctattaaaaaaaaaaaagcccaggaccagattcacagccgaattctaccagaggtacaaagaggagctgtaccattccttctgaaactattccaaacaatagaaaaagagggactcccccctaactcatgtttaactcattttactcctcccagcatcatcctgataccaaagtctggcagagacacaacaaaaaatgaaaatttcaggccaatatccctgatggacattgatgcaaaatccttaataaaatactgacaaaccccaaatccagtggcacatcaaaaagcttatccaccacaatcaagtcagcttcatccctgggatgcaaggctggttcaacatgcacaaatcaataaacgtagtccatcacggaaacagaaccaatgacaaaaaccacatgattatttcaatagatacagaaaatgccttcaataaaattcaacaccccttcatgctaaaaactctcaataaactaggtattgatggaacatagctcaaaatattaaaagatatttatgacagacccacagccaatatcatactgaatgggcaaaagctggaagcattccctttgaaaactggcataagacaaggatacccactctcaccactcctattcaacatagtattggaagctctggccagggcaatcaggcaagagaaagaaataaagggtattcaaataagaagagaggaagtcaaattgtctccgtttgcagatgacatgattgtatatttagaaaaccccatcatctcagcccaaaatttccttaagctgataagcaacttcagcaaagtcccaagatacaaaatcaatgcggaaaaatcacaagcattcctatataccaataatagacaaacagagagccaaatcatgagccaaatcccattcacaattgctacaaatagaataaaatacctaggaatccaacttacaagggatgtgaaggacctcttcaaggagaactacaaaccactgctcaaggaaataagagaggacaaatggaaaaacattccatgttcatggataggaagaatgaatatcgtgaaaatggccatactgcccaaagtaatttatagatccaatgctatccccatcaatctaccattgactttattcacagaactagaaaaaattactttaaatttcatatggaaccgaaaaagagcccacatagccaagacaatcctaagcaaaaagaacaaagctggaggcatcacgctacctaacttcaaactatactataaggctacagtaaccaaaacagcatggtactggtaccaaaacagatacatagaccaatggaacagaacagaggcctcagaagtaatgccacacatccacaaccatctgatctttgacaaacctgacaaaaacaagaaatggggaaaggattccctatttaataaatggtgttgggaaaactggctagccatatgcagaaaactgaaactggaccccttccttacaccttatacaaaaattaactcaagatggattaaagacttaaatgtaaaacctgaaagtataaaaatcctaaaagaaaacctaggcaataccattcaggacataggcatgggcaaggacttcatgaataaaacaccaaaagcaatggcaacaaaagccaaaattgacaaatgggatttaattaaactaaagagcttctgcacagcaaaagaaattatcatcagagtgaacaggcaacctacagaatgagagaaaatttttgcaatctatttatctgacaaagggttaatatccagaatatacaaagaacttaaacaaatttataagaaaaaaacaaccccatcaaaaagtgagcgaagcatatgaacagacatttctcaaaagaagacatttatgtggccaacaaacatatgaaaaaaagctcatcatcactggtcattagagaaatgcaaatcaaaaccacaatgagataccgtgtcatgccagttagaatggtgatcattagaaaggcaggaaacaacaggtgctggagaggatgtggagaaataggaacatttttacactgttggtgggagtgtaaattagttcaaccattttagaagacagtgtggtgattcctcaagatctagaaccagaaataccatttgacctagcaatcctattactgggtatatacccaaaggattataaatcattctataaagacacacgcacacgtatgtttattacagcactattcacaatagcaaagacttggaactgactcaaatacccatcaatgacagactggataaaaaaatatggcacgtatataccatggaataatatacagccataaaaaaggatgagttaatgtcctttgcaggggcatggatgaagctagaaaccatcattctcagcaaactaacacagtaacagaaaaccaaacactgcatgttctcattcataagtgggagttgaacagtgagaacatgtggacacagggaggggaatattacttactggggcctgtggtggggtggggggctaggggagggatagcattaggagaaatacctaatgtagattgacgggttgatgggtgcagcaaaccatcatggaacatgtacatctatataacaaacctgcatgttctgcacatgtattccagaacttaaagtataataataataaaaagaacagatgatgtatccagaatgatttttttttctgtctataacctttagttagcaatttctatcaaggcaatgctaaactcattatgaacaggaaatagatgatacaaaacaaagcaaattaaaaaataggtctgggccaggtgtagtggttcatgcctgtcatccccgcactttgagaggctgaggggggaggattgcttgaggccaggagtttgagatcagcctgggcaacatagtgagacctcatctcttaagaaaaaaaaaaatttgccaggcatggtgtctcacacctgtagtcccagctacttgggaggctgagctgggaggatcatttgagcccaggagttggagactatagtgagctatggtttcaccactgcactctagcctgggctacagcctgagacccttactctaaaacaaacaaacaaacaaacaaacaaacaaacaaacaaaaagtcttaggagagctgattacagtttagcggaagcagccttttgactttcccttcttttaataccagggattttacttagattgcaaaactgtggatgttttgtggcaacttggagtctcaacatctattagcaaaaaagtaagaggattgtaattacagtctaagcttcggagctggttgggcctgacatttgagaaaatggataaggccagccctttgtctccctctgcccccacccgcttccctctctgggacccaagctctcttgctgcccagccaaacctgtcgtcttgagaaggcactgaagctgctgaccctttctgctctgcccaccaaaatataaccacccacagtctctgttcagagatggaatccagtgagatacctataatacattcacagtagatgtcagataatagaagaactcactcttctcatatcacatgggaaacacactgttgtcgcctttccatcctgtttcaacaattcagattatctcaagattcagaagctgcgatgttaaattaggggtcaactgtcccttgcccccctcccttgtgacctcactttcctgtctctcattgatacttgctgtctgcaaataacctggactctgggtacttttttcatgtgaaaggaaggattttgagctctttttggctaaagttgataagaaggattggaaagtagcttagttcctaattgaggttctctccctgtctctaaatataaatagaaaaactcatggaacatttgtgagagaagagttatatgtttagttgcttagaacattttattttagaaataaatatttagggatacagccattcatggtgttttcatgaacttatcccttatgaatgcatatgatatgttcattcacctctttgtagaagctttgatcgttttgcacaaaacaggaagtagtagtagtggcagtatggatttgggagggtgaagttagctttggccaggtgatctctgcatatcagactattaaaggcagcgcctttacagaatgttggctgggctgtgactcatgctttgctttgcactccctaaagaggctttatgtatcgcctctttgtcctttcccaagtcatttgaaaataaatagaagagagaataatgtgatcaggggctctaattgtatttattgcttatgtagggttgtagtagatacagggatgtttccttattctttatgtcttgcacatctgaaatgtgtcataataaatgatattttaaaaaactaaacagaacaactagttttgggaatttgtcctacatagtcatatgactcatctgcatagatcctaatatgatcatagcttggccatttccattttttctgtttttctccttcttaaacacaagtggaatttttattttatttatttatttattttttgcgtttttcaatcttggataggactagttgcttcccaccttttctgaggtacagaaaaaaataagtgcgtgctgccatttgcttaaagatcagcagtttccatctctgcaggtcagaaaggaagtgaatacaatgtattggatcaataagcacagatatttgcaatactaactataccaatttcaaaaacacagtaagttgtatatttaattgaaagttcagaaaggacaaacagtagatgacagctaatacagtttgaaaagaatgtttaaaatgtgcagacaaaagattatttgcctataaacaagattgataatttataatcatgtgatggattgaatctctttcataaatatttgaataagatgggatcaaggcagtaaagttgatcatgaagctttaccttgtcaatcctcatgagtgttgacaatacctgttgggaataaaccctgtagcctggctgaccaactgatatctatatcccaatccactggcacatcaataatttttgtaaagtaaaaagaaaaagagggagagggaactgtttgtttgatggtggatggagaaagtgtcccaggaaagaaagctacatgctggtgtcttagtggcagccaggaccaccctgtgtggacatgtagtttgtactctgcatgactcctgggggcatcattcacatagattcctaaaggaatgacgctctctatggttgtacaatctcagccctagtggtaatcatttatttggcaatctggaaatgtttccagaagtatcccttgtgaaggacaaaggtctactgtgtatcttgcatatttcattattaaccctgtgacttgtgctgagtaactacttaatatctattcagtgctaaaataagagaaaggcaactttaaaaaaaaaacctttttgagacataattcacatattataaagttcacctgcctatagtatacaatgatttttagtatattcatggagtagtgcaactatcaccacgatcaattttgaaacatgtcatcaccaccccacccccagaaaaataaacctcatgcccattaacagtcattctctgttcctctcttgccccagctcctggcaaccacttatctactttctgtccctacagatttgctgattctggacatttcatataaatagaaccatatactgtgtggcttttggtggcaagtttcttgcacttaacgtagtgttttcaaggtttatccatgttgaagtagcatatatcagtactttatttcttttttattgccaagttatattccactgtatggctataccacattttatttatccattctttagttggtggacatctgagttgcttctacttttttggctattatgaatagtgctgttgtgaatattcatgtacattttgtttgtgtggacataagcttttaattctcttaggcatatatctaggagtgaaattgctggagagaaaggcaattttaatttagaaatctctacattatttgcttttatatttaaagtcatcttattaatggtatatatctggcttggctggtaattctgggtcctgtatcaaacctccgccttacaatccccatccatgttgtgagccggtaggtgaaccacagaaaattgaaatgtactactgggttagtctctttgaacagggtcatacttacattgaattcactctgatttattattttgctactgcacttggaacacagacagtattcactaagaattggaactatagactagaaacagaggttccctgttttcattagtcaactctcaaaggatggaagcagccaatttcagactattctagggctcttgctctcttagttgcttgccatccttctttcttttggcctttttgcatttcattagtgtcacttacagagctaagagaacacagataattcatccaaagtatttttatagtctttaggtgaaaagaacttttaatatgtgtgtcatcttggtttctatgtcccttgtaaattatgttgtttaccctgaaactatgaagaagctgcagttgacttccttcaacctaatcttagcttctagtattgtgctattggagttattattgaggatgataaaaagagtgtatagtattgaaggcaaattgtttaagtgtgtaaattataatttgttttttttaaagggggttcactaacagactaaggaccatcagaaagatttttttaaatagaccatatttttagcaacgttacacatagttgtagtggttatgactttgcaaaataaacatcgtcttagaattgaggtcctagaattaatggacttaagtctgatttttaatgggccaaagctatttaaactgtacatgcattaacaattttcttagtggcatgtatacttgagtaggaggttataaagagtagacaatgagaatgatgctgtttgacttttaaagggaacattgtttcattggagaggaataaaatatggacttctctttaagcaaggcagtttgcatttctgttggccagatttcttgagaatgtgataaagcattagccccaccatttccagcatcctccatttaattcttcttagactcttttccacagaatgaaattgattgattcatggctgagggtttgaaaagagagccttggggaaaattttaagaagtgttccaggaggccataaagactgttgacaggtggccaagcccaggaaaaaagtattagtaataacaacagctcaccctacatagctcttaatcatatgtcaggcagtgcactaaacacgttacatgtactaactcatgtgattctcacaacaatcctatgaggtcaaaacttgtttttatccccaatttagatgaaggaattagggcacaaataggttaaggcaattgttcaaggtcacacagccacaatgtgagcccaggtggtctagttccagagtcagtactaaccactaagtgtgcagattactagaaacttggagacactccaactcctgaatatggtgcctagccagggctctggaggaagcaggcagggcagggcccaggtccctgccagcactttgccaaaatgaactggtgaactgaggcactgtcatgacctttgctgcttgaataatttcagacggcaaaagaagcccagtcatgtgaaattcctttgtggctagaagatgtcaacaggcacagatctagctcatctttcaagatatgcaattttttttcttaacagaatgaatgctcctgtatataatattgtcctttatggtggctggttcatagaaactgacaaagaagtcaaattaagagcagttaaaagttaaagatgtaaaagttaagtcacaagacccaagtagagtgagaagaaggtaatttgtgtgtctgtttaatccctggcatgacctttaatctctgctacttaaaaattacagatgcaatcttaactatggcataatgaaacaaagaccaccacttcttttttctttctgctttttgaagttgcgcagatgtcagaggaagataaataaatactgttaacagcttctggaagcataatgtgctttgaaagagtgagtcaaagctcgagccagggtttatggcctcagcaagtcgaggttttcctgatgacaaaatgaggccttggggttttggaggaagctttcttgaagaatgagcacagccaagaatggtgctacacttgggactctcctttgtcaatagaaaaagacaaaggacccgtttataaaatggatatcaagtagcagattagagggacatagttgtgtcaccggtatgatggtcgtaactgcaagttgtccaggttcttggtgttttgaacaaagaattggacaaaacgcccagcaaagcaaagaaagaatgaggcaacaaaagaacaaaagcagggatttattgaaaacgaaagtaccctccacagtgtgggggcgggctgagcagcagctcaagggcctggatatagaatcttcttgggtccaaatactccctagaagtttcccattggccacttcatgctcacttcatgtaaatgaagtggtagcatgcaatcagtctgattggttacagaaagccaaccagaggctgaagtgaagttacaaaggtcacactcctgtgcaaacatctggttggttgcaaaaagcaaccaatcagaggctagagtgaagttacaaagttatacttctatgaaaaggaagacttagccggcaatcagtctgactggttgtggacagcaaccattcagaggctggagtggagttacaaaattacaaatgaagacttgaccggcaatcagtctgatttgttgtggacagccagtttcccatctgacatgcagaaaaggcagggggtttgcaaagggagtagcttctggtctttttgtatttttttttcttttttttagtagagacgggagttttcaccatgttagccaggatggtctcaatctcctgacctcgtgatctgcctgtctcggcctgtcaaagtgctgggattacaggtgtgagccaccgcacccggctgcttctggtccttttattacttaggcatgaaaagttagggttttcctttcaatttagtcctaggaagttggcgtgaaacagccttaggttccctgcctccagaccctattctcctgcctcagttgaattgtatttcagcaattgaaatcagctaatcgaggacagacacctcatatatgttacccacctactctccctaatatgtagaatgcctatatataaaaataatagcaagaaacaataattacaacttattgacaccatgtgtgccctgtactagcatcacctccattttatgtgggaaagaactgtgttggagggtgaagtcactagcccatattacacaagtcttttaactacagagtcagctttcttaaccactggagcccattggggttggaataaggctttggaatatcttctggggttaacgggggaattcttgaaagttttctcaataggaaagtcacgaaaaagtggtatcgctgctggaaggcaggatggtttggcaacttttgaactgtggtctgactgtgaagtgataagagtctgaattaatatgctcaattagagtcaaaaggagaggcaagatggaagactccctgagaaggaatgggtgatccttgagacatgggcactgaccagatgtgggaattagggaaaggagggagtcaaagatgaatccaagatctccagagtagtgttagaatgcttgtgccatgaatagaaatggggaaataggagattaagccaatttggaaagacttcttggcctgtgttggtggcagggcactgccccacaaagcatactggttagtgggaaatgtggcagctctttcttcattgtcagagcctttgttttactacacagaagcttaaaacgctggatgcttgctttcctagactcccttgcatgtgactgagatccagtcatgaggcacaggtggatacttattggaaagatttttctctctgataataaaaagtctagcaagaaaaacctcttcctgctttgggtttcaaatgcaaggataccatgatgtcatgcgaggagctgctgcagccattttgcagtcttgagggacagaccaagaaaattaggggaagctgactcagagccctgacactggggagcccctgaaacaacaccaggaccgtctgcctctcttatgtgaaaaaagcaccccccaaccctggtcaagccatttttagatgagttattttgtgatttgcagccagagcatccaaattgatgcagactttgtgcaggtcacagatcaccttgatctgagctttgctgtgttttctattttggatattaattttggaaaaacaccatgtgggaaatgatcatcacaattgcccactgaagcctccaaaatagtaagagttccagaaagagagagagagaatgcactttggataccatttctagaaaatgagggctttttaacaaaagtctgtaaaggccgaacagcctggcccagatcttaggcccgctttgctgctaggtgagagcctctgttaggtttcaatagtgcaatgtgcttctcaaatgacaacggggcccattagtaaattaaacattcccatagcccctagatacaaactgggcgaaagaagtattttccgttttcagaactgctgctcttttcatttgcttcttcccaccttccttgacatttgctggtgtctgctgccaggaaggcatgtttagctcagtgatggatgtgcactaatgagaattagcctgctttgtggagcttttgaatcagagcaagtatgctgttctgaagggctgaatgactggttgattgaaaagtaattgattgcagaatttcaaaatgagattcaaaaggtacattacaaactagatttcacaaaagccaactttctttgtcatgttcttcttttcggtcattttatcctttttaagtttacaaaattattttagaatttagtaccaacttcaccatctgattcctgaagcttggggtattatatacatataaagtttatgataaattctcatgataaggaaaaaaaaccctatgctacatagattctagtcctgactccgcattaataactgccactcagggaaaattgtttaacttttctgagctcccattgttgttgataaaaatgtttgaataaatcatgcatgagatcctatacacgtgaacttagactttctatggtaagacacagattctcatattctacatggtattgggctgggggtcttccctatgctcctctctgagaaaacactcctgcagacagagagcaggcaaagaagcctcttgctagaggagtaatctcaacaaaatttggttttgatcgtgggattctgggtggagatgctagataaaagatgatgcagttgggcacggtggctcacgtctataatcctagcactttgggaggccaaggtgggtgaatcacctgaggtcaggagttcgacaccaacctgaccagcatggtgaaaccccatctctactaaaaatacaaaaattagctggccatggtggtgggtgtctgtaatctcagctactcgggaggctgaggcaggagaattgcttgaactcgagaggcggcggttgcagtgagccaagatcgtgccactgcactccagcctgggcagcaacaggagtgaaactccatctcaaaaaaaaaaaaaaaaaaaaaaaatgcctagttacatttgaatttcagataaacaaggattttatttttagtataagtatgtcccaaacattgcatgtggtatatttatactaaaacattattcattgtctagttgaaatttgaatttagctgggagtcctgtatttgtattggctaactctggcaaccctgattctgagaggaataattgatggtaatggcctgagcctaaattgctcaaaataagcaaagaggagctgcagaggattcttaggtcttgatagatatggtgtcctgggaggggctgagtaggttcggctaaaggtgaggggagtgaagggactaagatacatattaggagcctggctaggacgagaaccctccctcctttcttcctcacgcattcttaagtatctcctctacccactttgcttttataaaccttaattagctttaacgtaaagtgaaaatattggccgggtgtggtggctcatgcctgtaatcccaacattttgggaggccaaggtgggcggatcacaaggtcaggagttcgagaccagcctggccaacatggtgaaagcctgtctctactaaaaatacaaaaattagccgggcatggtggtggccacctgtaatcccagctactcaggagactgaggcaggagaatcgtttgaaaccggaaggcagaggttgcagtgagctgagattatgccactgcactccagcttgggcaacaagagtgaaactccatctcaaaataaataaataaagtgaaaagattaactttctatgataggctgtcgttttggcatcctttttacggtccttgttcctaattttgaaatgagtgggtggaccttatttttctcattctccctgctcacggccccctccctaattcaattaatatctgctggtgtgtgccccagattgattttttttttttttgccctctgtggactagttatttctcaacagaaaaatgattgccaaatttctgaaattcttttctaaacttctgaaccttttcaggtgttatttatgctcatcattcagttgtttgtacattcttcactcacatagcaaatctttaggaagtaaaagaattgcactagggttttaccctggtatgtagctgtgtggagcacttcagaggcagaattaacattgtgcgctactagttttattcctgtttgtcaaacaagatcacttaacacctctgcattgggtaaccatgctttcccatgaagcgagaggactgctgagcttgagcaatggcggggacctctcccagatggtaagtgttttagggcacaaggtcattatattaaaagtagcaagagaatgaacgggaatcaggcggaacatactgatactgacacatgtgtggcacaagaaattgctaaggtaggtgcctgatcgtaagggggtgtcccctccaaatattggcacttgaaagcagccacaaaacctggtattttagttatttatcctgagggtgagtagtgggagggacctttcgtggtaccctctgtgtggtgcttgctgtggtccttgtgttgtagcctttgatgtccaatgtgcaagatacagaatttggcaaatagaggtcgtttgtcaaggttggttctaaaggggctgcctaagtttgtcatctatgcaacataattcaaaggcctgttctgttaaaaaacaaacaaacaaacaaactcttaactacctcagaaccacgagtgaatgcagaacatttattcagaacagctttcttctatttaggcaccaaggctactaaaaagaaaatgatggccccaccatctgggagcttacaaaattaagcagatggttaaaatgcagtgtaacaagaggtgtggtgatagatcacactgggttaggagcctgctggaggcacgcagtacactgaggacttccgcaaagagagaagcctgtagacgcaggagattgtaagcgtggacactgtaaaagctgctattggtgccatgcccaggtccccttaactggattggtatccccagctgtaagctgttgtattggctgctgaggctcacagctgcactctcttgtggaaaattgtgttctgctgaaaggagcaaaaaaaatgaggttacataccttccccccagggatggcctagaaccaatgactgatcaataagaaagtacaaaaatctggccttcttgcatcaaagcagacaactctgtgtgcccttcctgctccagagatctgatgcaatcaggctgagaacagacttcagctggaaccacattttcacttctgtgcctttctgcttccttcattgccctataggattctcccaagaacatccctcagtacatcgcttgtaatgaatccctgtctctgactctgctcctaggaaacccctgatagcagagaagcagaagttgagctattctggtgttcagggctcatttttcctgatgtggggagagggaatagacgaagtggttgggaacattggtgaaggtctgatgtgaggcatgtgagcaatgtggagaatgggagcagtgtctgatatcaacttaggtgagagactaccatatgtgtatggcaccagtctgtattgtggtatcattttcttcagcactcagcagcctggggtataaaaacacagacatagatgacacaaggttgtagttctggcaggcggatgccataggaagtcaaggaaccaggcacgacaagaaaggacttgaagataggaaggaatgactagtttgagagaaaatggaggtgtcagtggaccaaagctgttcatacaatggaagaatatgtgtgatgaccaaaatacaggtaacaagtgtcaagattaggaggctaggctagtgtgttgagagtttggaacaggagaacttaagatttgaaggtttaagcatttctgcctaatgacatgtctaggatatgccacagcacaggtgtgtgagtgaattggagggtgtgcttctggggtgaggagggcagggcactgcagtgttagggagctggatgggccatcctcttggacactgccagcactgagccacagtagtggtccaaggaattcacactgcacatgcagctgttacctgccccaagtcccagagatgccatcacttcctgtgtcaggccttcgtggagcaggtgtccctaatgaaggcagtgggcaaagacaaatgacttggaggtatggaatttcccaaggagacccttttgtggtggtatagaaaccaaaccacttgttaacaggttaaatatttcccatctttctgttttcatgctgacataggtgttcttggactcattgaccctcctggtaaatctcccagtcaggagagttccacccttattggatctcattccatcatcctcctatgtatttcgacttgctgtccttgtctcctaatcatctcaatgacccaggcattgaagaatgaagagtgccatgatattgtaagagaagcagtttgatgtagtagacagggtcatgcttttccttctgcctggattgttccctattcccttcctcattcagtcaattcttactcatcctttccatttggcttaaatgtctctcttctccccagagtatttcagagtccacttctgtattatatactctcaaagcaccttattcccctttgtgactcttatcacaattataattaaacaaacaaaaagattatttcattgcttaaggtctatctgacttgatagcatgtaacctctataaggataaggctgtctgtgttatccctagctgctagcatggtgccttacataaagaatgtgcttaataaatatttgtagaacaaataagagacgtatatggaactgagagtccatttctgttttaaggcatgttcctatttagctgtgtgatcttggacaagtcacttcagctctctgagcaaaataacttcttactcactttaacattgtatgatttctgatttcacagtctatcagccaaacaccttaacaactcttaatcccaacagtatgtctgggctaactaaaagcattcatctggaacttcttaaagtagcttgttcctagagaaactatttttccttgtgtttcagtaatctctttctaagtaaaaaataattcccacatttagtggcttaaaacaataatttgctctctcaaataaacaagaaaaaagtaataataaagatcagagtggaaatcaataaaatagaaaaataaaaacagaggaacataacatagagactgtgcaatgtttggggaaagaatatccaaggcagaggtactgctaatccacaggtcctacagcaaggcatgcctgacatgttttttaaaatcagaaaagagggctgggtgcagtggctcatgcctgtaatcccagcactttgggaggctgaggtgggcagatcacctgaggtcaggaattcgagaccagcctggccaacatggtgaaaccctgtctctactaaaaatacaaaaattatctgggcgtggtggcaggcacctgtaatcccagctacttgggaagctgaggcaggagaatcacttgaacctgggagatggaggttgcagtgagccgagattgcgccactgcactctagcgtgggcaacagagcaagactccgtctcaaaaataaatacataaataaaataataaaaagataaaataaaataaaaatcaggaaagaggtcgtgcatggctggagcagagcacccaaagtgtatcgagcccctggtcaatgtgaggacttcggcttttcctttgagtatgatgggaaacccctggatggttttagcagggaagcaatgcaatttgaagtcatcagctctctccttctgtgtcaattatagtttgttctcttgcctctagtcatacaaagttgtatttccctggattgtgagacagaaaaatctaattctatatgatcagagataggctgttgctttgggcaggtttttatttcatgtttatagattaagagtttgcactttcagttcccagggagttcacacagatggggtgactgctttgtcttaattgcaattgtcatgatgtatgcgtactttcctagaactggactgaggctcagatggatagatagttcaaggaagatagattaacagagagagggagggagaaagaaagagagagagaatagattaaatggatggatggatggttagattaacagacggacaaaataaatggatgatgataggaggaggagagagctcgtcctctttgaggcagtgtataaggaggactggttgactttttctttctttgtgaatcacaaacagagtttagaagtggtatgttttcattaacgctaccttaattaatatccccttaatcatcaagtatattccattttgacaaaatagaaactgaattccttcttatctcccaaaggcaatggaaaggctagagagagctggcactgtgctattacaagcagatgagaggcatatttgctgaataacgagagtagctaacagtactgaactttgcccttttggtgtgggactctttctttcctgaatgttcaataatgtctggctcttttcctttgtgttctggttttatgcaaacacaaattacactcttgttgacttcactgtaacccatgaaattaaagaaggggaaattggagtcctatagaaggcagtttcaccagtcctgcctcttggatttgtgcgatggaaactgagaacagctgtatttttctaaccaattttatgagaaaagaagtgtccccagcagtaatcagcacaggcacatgataggaacagacagagatgctgctttaaaatcatatattctagagctgaaagccatctaagagagcatccaattctccctcattgtataaatgaagaaagtaactaaaactcggaggtacctgttcacacttcttgagtatatactaattatgggaagcaacgtggcatcacagaaataccacaggccttgtggaagtctgtgtgggaatcatagctctgccacttcctagctgctgtggctattgggcaaattatattatctctttgagccttctctcatctgtccctgcttcatgggctggttataagaatcacatgatataaaatataaagccctggcacaaagtagatagttaataaatagtagttatgattagctcgcttttgttgctagtgacaatacagagtaaaaaccatctcagcaaatacttagaataggattttaaaatgtcaaccaatggcaaacttgtttgaagtaaatttcaatatactgaaattccaatataattcagggaaacaaacatttttatataaaatattgtgctatacactagagttagttcaaaaataagaacaagatctgggttctgcttttaaggaaatgagagtagacatgcacgctaggctgcctttcagtgagggccgtgggacgggccactggggaggaggggacatgggtctctgggtgcacagaagaggttcttcctggacaaggagctcagggaagtcttcacagagaaagtaacattcgagaggtttttagaagggtctagaaaaacagattgagggacattcttattgaagggggccccataattacaaatacaaagtatatttagatttaaccaactcctctgtttaaatgagcatagaatatgtgaagggcaaagcttaaaataaaaatgatagctaccacttacggaattcactcatgtattcactcttttgctcgttgtgcaactctgtgaggtagattattatctccattttgccaaagaggagacaggcatgggcaggttaaatgtgttgcctaaaggcctcacagctggtaagcagtaccaaacttgaattcaggtcatctgacttcagagtccatgctccagttcggacattagacagtgagcttgactttttctgctagccgctccagatctataccctcctcttctccctgctgctcggggacccaggatgctgagctgtgtgggctctgtcagcatgctcccttggccctggtttcccgtcataataatggagggaaatgggagatggggcctcaggtttgccagggctgtatccctttgttagaggacacagctcctgttggccagccgctcttgcagctacaggtctccctgtgttgaaaaactcttctgtctccttgtcccaggacagctaatgctagcctcagaacacttcaccatctcatgttggttcctttaaccctgtccctgtctcagtgaagatcggaatttgggggttataggataatctgttcagctttagtggatactaccaaatagtttcccaaagtggttataccattttttttcctactagcagtgtaggaaagtttcagttgcttcccccttttgccaactcttggtattttctgtccttttcattttagccattctagtgggtacacagtagtatctcatttgtgatttcagttttcatttctctgagaactatggaagttggataccttttcgtgcgttcattggccatttgaatatctttggtaaagtatctaaatcttttaccctttttcttttctctttcttctccctctctctctttttttgtttttgagacaagtgtctctctattgcccaggctggaatgcagtggagtgatcccagctcactgtaacttcaaactccttggctcaagagatcctcccacctcagcctccatagtagttgggactacaagcgcacaccaccacacttggctaatttttaaaattattttgtagagatggggggtggtgaatcttgctatttgctcaggctaatcttgagctcctggccctcaagaaatcatcctgcctcagcctcccaaagtgctgagattacaggtgtgagccactgtgcatggcctttttgcccatttttaaattagattgtcttttcttttggattatgaagttatttatagattatgagtaaagtcctctggcagagatatgtattacaaatatcttcactctgaggcttgccttttcgttctcttaagcatatatcttttgatgaagagatgtttttaattttaatatactctatatattttgtttctttgtgttactatttgtaaaaataataagaaatacacatattgctctcggcccacagtccctgatacagagctcttaaaacccttgtaatttcctaagcaataaggatgctaggagaaccttttgttctaatattcgaccttttactctggttcctgacttttaaagtccttaggaattttagagcttttaaagtccttaggaatttcctgggcggcaggagcatcatttaataaggtagctcttggtggactcctggatgggagctggtcaccataaagactaagccataattataagctggggtctttcagccctaatccaccaacttgccacaattctccagagaagggaaaggggctagaaataaagttaatcactgatcatgtctacgtgataaagcctccataaaaattcctaaactatgggattcagggagcttctgggttgacaaacacatctgcatgccagcagggtggtataccccaacttcatgggcataggagtgcctgcacatgggaccctttcagacctcgccctatgtatcttttcatctggccagtcatctgtatcctttattatatccagtaaacataagtaacgtatttccctgatgctatggtttgaatgtttatcccctccaagctcatattaaagcttaatccccaatgtggcagtattgagaagtggggtctttaagaggtctcgagggctctaccctcatgaatgaattaatccattgatggattaatgggttattacggtactggaactggtggctttataacaagaggaagagagactcagctctctggcatgtgatgccctgtgccgtctcgggactctccagagtccccgccatcaagaaagccctcaccggatgcagcccctacaccgtgggctccttagcttccataactgtaagaaataatttccttttctttataaattaggcagtttcagatattctgttataagcaacagaaaatgcactaagacacctgagttctgtgagacactctagcaaattaatcaaaccaaagtggaggtcatgggaatccgatggatagctggtcattcagaagcagaggccacattctgtgcttgtgactggcatctgaaggggggtgggggcagtcttgtgggactgaaccctcaacttgtgggacctgacactatctccaggcagatagtgacagaattcaattgaattagaggatacttagctcgtgtccactgtagaatctgccagagaattgcttggtgtgtggggaaaaccccccaccctctggcatcagaagtgttgaacgattttgtgagagtagagagattcgaagaaccattggttttacctatatccttacatggctttgtatggtttttaaaaaggcatgtttgctgctacaatatcataagaatgttttcctgtgctttattctaaaagctttctggttttatctttcatatttggatctgcaattcatttggaattgatttttgtgtgtgatgtgagattagagtcctgatacgttttttctctcgtatggctatccagtgaacctagaaccttttatttaaaatattctcttttccatcagttcactgcaatgtcatacttttcatgaatcaggtgactgtatacatatggttgttttcttgtatgctatgttctatcccactggtctatcttcttgtctatccttgtgccaatattatacaatcttgattattatggctttataatgactcttgataactggaagtggaagtcttccagctttgttcttgaagattgcctcagctattcttggtcctttgcattttcatatgtattttagaaatagtttgtcaacttccacacacacacacacacacacacacacacatgcctagagtttggtgaagattgtgatgaatctataaattcatagaaaattaacatctaaacatttcaattcatgaacgttatgtttaggtcttctttaattttcccagtaatattttgtggttatcagtgtaaagttcttatacatatttcattagatttattcctatgtgttcgatttgctatagtaaatagtattctttttaaaatgttgtcttttgtttgttgctattatatatatatattttttgagacagggtcttactttgtcacccaggctggagtacagtggcatgatctcagctcactgtaacctctgcctcccaggttcaaacaattctcatgcctcagcctcccaggtagctgggattacagacgtggaccaccacgcccagctaatttttgtgtctttagtggagacagggtttcaccatgttggccaggctggtctcaaactcccgacttgaggtgatccacctacctcggtctcccaaagtgctgggattacaggtgtgagccacggtgattggccatataattgatttttgtatattcaccctttgtctagtgatcttgtaaactcagcaaagtatatctgtggaaggcatttggtagatatcctttattagtttaagaaaattatcttctattctgtttttctacacttttgtttaaaaccatgaatgtgtgctgacttttattaaagacttttccatctcttaagatgtccaaccctgttttgactcagctctaggacccaattctatagccctttccctggtcttggctttatccccacaatcacaaaaactccatgaacaaaaaggaacaaacaaggacctgaaccgaagaagtgccagtaaacatggaaaggaagagacaactgtaagagattttgatgttctgcaatataaatgttttgtacagtcccagatgtgttgagagagaagccgacttctcaaaaaaattttttttttttgaaacggagttttacacttgttgcccaggctggagtgtaatggcacgatctcggctcactgcaacctgcacctcccaggtacaagcaattctcctgtctcagcctcccaagtagcttggattacaggcatgcgccaccacgcctggctaagttttttgtatttagtggagacagtgttttaccacattagtcaggctggtcgtgaacacctgacctcaggtgatccacctgcctcggcctcccaaagtgctggaattacaggcgtgcgccaaaatgcccggccgacttatcagttttttaaactcctgcctccttttgataaacataaaaaatccacatgaaacttttgtttaatgtacgtattatggaaacaataagctattttccaaatataaattttaatatgattaagctttttgaacttttaaatatagattgcccttattagagattaataatatagtatgtgtaaaagcaaattacacattctataatcccctgcccctaaagtccgatacatcctccctgaaagggtacttttctccttcactttctcctaattgaaactcactgaaatagcatctacatagaacatcactgcatggtggagcggcagataagctggttaagcaatctatcattactatcatctggatgtcccaggatggttggggtaagtagaaatgtatgaagactctaactggcaatgggattttatcattgaaaagtgcagagctggccaattcagacccaagttgcaggtgtacctgggagaatacacacttgtaggttttcaaatttactaatatttaagcagtttgattctctacaattacttcaacatttgactattgggcttgaatttaatgaatcctggtgccctcttgtggacatgagagaatgtacaaagagtatagctttgagttcttttcattttaaggattactttgtgtacccatgtcccattaacctaagataactcaataggtagaagatctcaagtcacacagccaggcataatgttgccaattataagccctgtgaacttaagattccttatctgataaatggcagtaacaatagtacccaccttactaaggttcttgagaagattaaggatttaaggaaattcccttccattcctactttcctaagattttgtttgaaaccatgaataggtattgaattttatcatatgttttttctgcatttttaaagatgtacacttctgttttgactcagctctgggacccaacactacaacccttctccaggcatggctgtacccttactttatacatccatacatacaattggccctctgtatctgtgggttctgcatctatggattcaaccaaccacaaattgaaaatatttgggaaaaaaataataaataataatacaacaataaaaataatacaaattttaaaataatatagtataacaactatttacaagcatttaccttgtattaggtattgtgacttttttttttttttttttgaaacagggtctagctctgttgcccaggctggagtgcagtggcatgatcatagctcactgcaaccttgaactcttgggctcaaataatcctcccacctcagccttccaaagagactacaggctcatgctactatgcctggctaatttattattattattagtttttgtagagatagggtctcactatgtctccaactcctggcctcaagtgatccttctgcctcctcctcccaaagtgcttgggattacaggtgtgagccaccatgctcagcctagagatgatttaaagtatatggaaggatgtcatcaatgatagactggataaaaaaatgtggcacatatacaccatagaatactacgtagccataaaaaaggatgagttcatgtcctttgcagggacatggatgaagctggaaaccatcattctcagcaaactaacacaagaacagaaaaccaaacactgcatgttctcactcataagtgggagttgaacaacgagaacacatggacacgggttggggggagggcatcacacaccagggcctgtcaggtagtggggggctgggggagggatagcattaggagaaatacctaatatagatgatgggttgatgggtgcagcaaaccaccatagcacgtgcatacctatgtaacaaacctgcacgttctgcacatgtagcccaggacttaaagtatgataaaaaacaaaaagtataaaaataaagtatatggaaggatgtgtgtgtgtcatatgcaaatactataccattttatataagggacttgagcatccatggattttggtgtctgtggatgagggggcctggaaccaatccctcacagatactgcaggatgtatcttagcctggcacatagtgggctctcaataatgttatctgtgtttagtatcaatcatcttaatcaattatcaatcccttaaaggaaagggaagggtatgaaggatatagtatcccaaaacagagtggctacagatactagtaacctctcctccccagtcccatcctacctcattcctgattccctgcagcaactactcaactctcaactatttctttttatatttatcatcatatttttaataacatgttttatggatcttcttcattttttttgtccatatgtagtattatctattgactttctattatggaagatgaacgtttaactctcttacagtactccctccatacttcctttcccccatttatgatcccatgtatgtaaaaataatgtactctattttatatatttggtcctctccataataaccaaaaatatggaccaaggcataaaaggtgaatactaaaaaacggaaccttgtttcacattattaatgtcaaataagcctgaactcttcttaaatgaagcaaagaaaaaatttataatgaaaaagattataatttgcaatgataatggagttatcacataactttatgcaacaaggaagaagaaataaaaggagaaggttttaatcacctttgttggtccatgtctgatcaagcagaggaaaactaaaaaggacataaaatatctaaacaatttaataaataaatccaaatgtgattccagatagactcatatgaccaaataacacatgcaaatattgaccttatatcaggttatagagaaaactgttttccaaagcagctgcaccattttacactctaatcagcagggccaatttctctacatcttcaccaatacttgttattatgtctttttgatcatagctgccttagtgggtatgaagtggtatcttattgtgattttgacttgcacttatttaatagttaaagatattgagcatcttttcatgcacttttggtcatttgtatctctctttttttttttttttgagatggagtctcgctctgttgcccaggctcgagtgcagtggcgtgatctcggctcactgcaagctccacctcccaggttcatgccattctcctgcctcagcccctcccgagtagctgggactacaggcgcccgccaccatgcctggcctggctaatttttttgtatttttagtagagtcagggtttcaccatgttagccaggatggtctcgatctcctgacctcgtgatctgccagcctcggcctcccaaagtgctgagattacaggagtgagccaccatgcctggccggtcgtttgtatatcttcttatcggaaatgtctatataaatcctttgctcattttaaaaattgaattgtctttttattgttgaattattattgaattctaagacttgtattgtagatgcaagcccctatcagatacatgttttacaacaattttctcccattatcagggttgtttttgtattctctttatgttgtcatttgaaacacagttttaaattttgatgatgtccaatttatttttttcttttattacttgtgcttttgtaatcgtattcgagaaaccattgtctgattccaggtcatgaagatttatgccagtgttttcttctgtaagtttatagctttagctcttacattcaggttttttttgatattttaactttttgtctatggtatgagctaagggtccagctttttctttgatctgtggatatccagctggcctaacatcatttgttgaaaacattattcttttccccatttaattttcttggttcccttgttgaaaatcagttgaccataagtatgagggtttatttctgaactcacaattctattatattctatttatgtctgttcttctgccagtaccatgctgtcttgattactgtggctttgtagtaagttttgaatttgaaagtatgtcttccaacttctttcttctttttcaagattgtttggatattctgggtcccttgagtttccatatgaattttaaaatcgcttttcagttgctgcaaagaagccaagtgagattttaatagggattacatttaatctgtagatcaaattggggaatattgccatcttaacaatataaagccttccaatcaatgaacgtgggatgtccttcatttatttaggtcttttaaattttctttcaacaatgtttcatggttttcagtgtatatgtgtcatggtacatttttgctgccataacaaaataccttagaccaagtaatttgtaaacagcataaatttgttgctcatagttatggagtctgggaagtccaggatcagagcaccagcagattcagtatctggtgagggcttgccttctgcttccaaaatggcaccttgttgcttgactttacatggtggaaggcggaaggacaaaggaatagagcccttccttcaacctgtttcatgacagcactaatcccattcatgaggttggagtgttcatgacttaatcacttcccaaaagacacacctcttaatactatcatactgactattagatcctaacatgaattttggagggacacatacattcaaaccatagcaatatgttttgcatttcttttgttcaatttatttctaagtatgttcttctttttgaagctattataaatggaatttttttaaaatttcattttcagattgttcattgccagtgtatacatatccccccctccgaatccagcatccacaatatttttaataatgacaggatccggttagtttttgtagtacagctggcctcttggcctctggtgtagggtttggagtagctgtgcaggtacctggggccttactgaaatgcttgtatatttcttggtccttgtgaggatgaaagagcaggacaatgcatagactttgggggcgtccaggtcaggaccttgccctccaattatgatccccacaaccattcattttgtgttcttggccaggaaacttcattttcttgatcatctggcctgttgctgccactcatgaatatcctctacagcacaacttggttgaaggtggagttggttcctctggccagaaacatgtaccgcttgaccaacagctttagatcaatttcctggctcttgagtttctggcactgggttccttgtggcaggtgtggactcccatgatggtgcctcctactcagccatgtccaaaaaagtgagcactctcagactctttaaatactttatttggaatttttggacatttacccaatttttacctaattttttccatatagaattacacatattcagaagtgagctaagagtctttttcttattggatcatttaggttaccttaggtctgaaattctcagatatgtattgctctcatctactagatccttgaaatttgccaaaatttaaattatttttggcaaaattgagcaaatatgaacacttccaatgtcagtgaggaagtgttaaagtgagtacttccatatactattggtgggactgtgaaatggtgcgggcactctgaaaataagtttgccaataccaaaatcctcagttaagattgtaattttagaccccgtacttttccttctataaatctatcattaaaatactgagatccagaccaagatttatatataagacctcctcagtattattttatagtacaaacgtgttgaaatcaatttcaatgtgccataaaaatatttatctatgcattaaaaaaggctgaaaggaaatatatcaaattgtaataatgttatctctgaagaatgggatgaggtaaagtcagtataatcagtaataaaaaatgggggcaagagcacagattgtactagttacagacttgagtttgagttctctctctgccagatgtagctgaatgactttgggcaagttacttaacctctctaagcctcaatttccttaaatataagatggtggtaataatagttgttgccttatagggttactgaaagaattgagtgagatatacacaaagtgcttagcacagcagttgatccacagtgagtgctaagtgttagctctcgttgtcattggtcacctggccttgtcatatacaactgcacaatcccctggaaatgtttccactgaatgagacacctatggatttggacagactggctttttctgccatgtacttcaatggccttagttgttgaggactcgatatgtgcatgtgatgtgagtgtaattgaccagagaggtagtgtggcacaggggaaagaacaaggagactttggtcccaatctaggtcttggttccctcatcagtgaagtgaagggagctggactagagaatttctaagatctcttctggctctaaaatgttcatttctcaccaggcacggtggctcacacctgtaatcccagcactttgggaggccgaggcaggtggatcacctgaggtcaggagttcaagaccagcctggccaacatggtgaaaccccgcctgtactaaaaatacaaaaaattagccaagtgtggtggttggcgcctgtaatctcagctactcgggaggctgaggcaggagaatcgcttgaacctgggaggtggaggttgcagtgagccaagatcacgccactgcactccagcctgggcaacaagagggaaactccatctcaaaaataataataataataataataatgccacagcaattgtgaatttagacttttgtctcctaaacacaaggtggcagcaaaagactaggctcttggctgccatttgccaaaaccagtaggataagatggtattatttaatttacactatgttataaagtaaaagatctaggtggcttaagatcactacctgctcttagtggtttctatgaggcccaggtttaatgtccctagaattatgcttttatcgctataatcggaattcccctactctcaatatatccactgaagtcaccactcaacaacacctctgcctacaatttctccaaggctttttctatcacttctactgcttcttggaaaaatacccttcaagttttcacctgtgatgagcaggggtcttgctggcagaatggcagctatgtgctttacaagataaaaacaacttctgtcttccaggatcggggaggatttgcagtatgggggcttggtagtgctctctcagggaaaaaatttcaaataaaacacccatgtgttgccagtctattcaaatatgttccaattataaacaatagtaggaaatctcgatgatctgtgggttgggtttctgtgttccttggttggagctgatcactcctggccaggtggggctggaaaaggatggtgagaaagtgggagacagaccatgaagtgagatgggaaaccccattgcagaaacggagtgaggggcctgtcctcagaatctaaagaaggttgttctgaagatccctagggaagaggccaggggcctagttgagacacaggtgaggtgaccctcaggagaatattttcaacctgaggtccgagggagtgggcctgaggcctaaatagaaagatcctctttcttcagggaccttggggatttccaggcagaagttgacctaagagaggcagtgggagtagaatggaagggctaaaaagatagggccaaaggtcaagttaaaggattgacatgtagactagaaggaaattgacacaagtaccaggaagaagttgtttaatggttctgatagatgccacatgacttaagcaactggaaactgaccttgcaacccctacaatggcattgggctcataccctgagattccaaagcagaggggatctccagaggagaggaaggagggcaggttataaacagagcctttttttttcagagaggatcctcttccttcttttatttccttcctgctaagtggtaagagcagaaaatcattaaggaaagcagcagaagaaactggcagatctggaatgtgggccattttctcaccacaatgtgggcttcttcacttccgcaggattctacctgctttaggggtcacaccctctgcagggtgcttggggatcgagggacaaggagggaaaatgttttaacctttaaactggtggcctttttggtggttactatctaaattacctccaaaatgattgggggtgggaaggggaaagaaaacctaacctggacctaagggacttgtggtagggatcggatactgcaatgagcgtggaatcatacatttctctttcaacttgatgaggtgctcccacggagggacagttagcagaaaatttggtaaaggccttatcacagaccagagatatgaccaactggggtgagctttaaggaggaactagggtagaaaatggttaatgttttgctgaaatacagggaagaaacaaggtggattggatcataaccaacttctttcacaatgtcataaaagtacccaaactgtggagtgcacccacatctacatgagcaagtcttgtgaattgctttgatgcttgcaccgtgccatctcaggcctgccatggtgctaagtcaccctccacagatgcagggcttccagcttccacctgagagcaggagcagtaggttaactttgtgtcaaagactcatccttcctttcctttgacttcaaaggtcccttggtggaactttctactgtcgggtctttcatgattccctatcagaggttttacatgtatgctttcgactctgaaagggagacaatgccagctaaacacaaggaaagctgttcaggctgagtgtgggagaaggggaagctggttgctgattctaattctgatgtttgaggggaaaataatatgtttttttttttgagacagagtcttgctctgttacccatgccagcatgatattggctcactgcaacctctgcctcccaggtttaagtgattctcatgcctcagcctcccgcgtagctgggactacaggcacctgccaccacgcccagctaatttttgtatttttagtagagatggggttttaccatgttggtcaggctggtcttgaactcctgacctcaggtgacccacccgtctcggccttccaaagcactgggattacaggcatgagccaccgtgcctggctggaaaataatacttctatctcactgatcacatttaccggtagtatgctttaagcaggaaacaagaactgggtaattgcggcagaaaagcctttaaaagaaaatgacttcattggcattagcaaacacctacagagataatatctctgaccttagctggcaggcactgagaaaattctgaggaatagagggggagtctggaagacttgggactttgatttttcttatccgggtcagacattgatctttaaaaaatgacatacgttttatagtcattaacttatcacttaaaatgttctgctgctacagttcctggagtaggggtagaacccttcagtttattgaggaccaaagacctacattaaaagtaaatcaaagcctaaagggaagcaaaaagcaacttaattgacttcaaaaatttttaagccgttcactggtttaagtaaaaaatatgaagcatagtaacaattttcagccactctggaaaacagtttggaagtttctcaaaaagttaaacatggacttaccatatggccaggaattgcactgctaggtaaatactcaagaaaaatgaaaacatacatccaaacaaatgttcatagtagcattattcatgatagccaaaaagtggagaaacccacatttttgttaactgatggtgaatacattaaatgtggtatatcaatataatggaatattatttagccataaaaaagaatgatgtactgatacatgctgcaatgtggagaaaccttaaaaaactgaaagaaggcagacaccaaaggccacatattgcatgattccactcatatgaaatgcccagaacaggcaaatccatagaaaaataaagtacttcagtggctgccaggggctggtttggtataggggagaatggagtaggactgcgagtggatatgaggtctcttttgggacgatgaaaatgttctgaaattagatagtggtcctagttccacaactctgtaaatacactataagccaatgaactgttcaatgaaaaagggtgaattttatagtatgtggatttaattttatgatatgcgaattacatctcaataatatatgaagcgtgaaactttattcaataaatatattaaacatttaaaatataattcaattaaaattaaaaatgaagtatagggaaggagaacaagacaacgaggaaagatggaagagaaaatacttggctcaagaaagaaaatgagctgggtgcagtggctgacatctgtaatcccagcacattgtaaggccaaggagttcaagaccagcctgggaaacatagtgagacccatttgttaaaaaagttcagatgtggtggctcacacctgtaattccaacactttgggaggccaaggtgggtggatcgcttgaggtcaggagttcgagaccagtctggccaatgtggtgaaaccccgtctctactacaaatacaaaaattagctgggcatggtgctggaagcctgtaatcccagctacttgggaggctgaggcaggagaattgcttgaacccaagaggtagaagttgcagtgagctgagatcacgcctctgcactccagcctgggtgacagagcaaaactctgtctaaaaaaaaaaaaaaaaaaaaaaattagctggatgttgtggcatgtgcctgtagtcctaactactcaggagcctgaggcagaaggatcagttgagtccaggaggttgaggctacagtgagccaagatggtgccactgcattccagcctggatgacataatgagaacttgtctgaaaaaaaaaaggaaggaaggaagaaaatgaaaaccaaacaagagaagagaggctgattccatgattttcaacacaatagaaatttccattgttctctgagattcccttgggctctggtcttcagaatgttattgttattattattatttcctttagaacttctaatgagcacattgaccattgcttccaggttttcgaattgtcctttgcccttaaactcctcagtggcttgggttttattccaatagagcagaggatatgaaatatttcttggttaatgtttctgggtttgcagtatcagtcagtgaccagagttggattttacgtctaaaaaccatataaactcaagccgagacttgtctgggtgtagacttcccattgccaaatttaattttattatttaaagtcatgttgagaagtcatgtaggtggtctttcttctaagctaggacagacttatcagtctcacttgcctggtactactttatgaggtaaataattaatttgagatattaggcataagctggtcttgatctgttctcaaactccaggtgggtagaaagctcaactgttgacacagggcctggcatgggaaatgattacatgggaagccatgtctgataaccagaaatgatacttcataataacacaaagataatgagagagattgggagtcaggttagtgtgtgaaactagcagtagaccgagagggaaagtgggttgtgatccttctttgaagtcaccacagagtctttctgctccttcacccactatggttagtgaatgaccaaggatactgactttacctcctactattactcaaatgtatatctcttctccgtcatttctcctgttcagttcctctttctctctagcctggtcaattgcaatatctttgtaacatgttttctagactgtaatattgctcctattatccatccttccaactaggaaagtaatattcctgaagtccaaatcatgccatgtccctaccttattagttctctgtgttgagatcagatgaagctataggcagagatgctcttatgacatgaaggactggggttcccttgtaagaccatcagaatttgccctatctaagcccctactcaggagcctagaggaatccctgaactgaatggtctgagtcagctgatactctcagataacagcactttgctcataatatatgaaaacaggagcatgatttagaaaaaaaaaaggaaccaaaatcaccagctaatagatattatgcaataagcacattacagaaacacaaagtcctggtgtacatcaccagggcagtccctgaggacagtctagccaataactacacttaagttgggtctccagatctgattttctaagtttctgatcctggatcctttcataaattatagctgctacctccaatcccaccccaagtctcatgaacaggaaatctgtgaaaaagttttacagggaggtttgagaactccctctgagctagccaatccagagtcttgctttcagccaagcttccatcatacccagattttaatgatgagttatttatgttctcacttaaggaaatcctttcctaccctttggaacttctatttatcttgttattaaaactgtcttcaaatagatttcctgctgcaatacaacacacttggtgactttctcagtcttacaatgggattagatatttagtgctgaaaggatcattgcaaggagagcaatcaggtttcttctcagtgacaactgcttggtcttctttgctgtaaaagaactttgctttgagctttgatacatggaaaatgtctgccagaggccctggtgagaaagagtccgtgtgtctgcccatcttgggtcatacccttgtcatccaggaactaacaagtcaccccagtttacatgcagttggcattggatgggtgtaggcaaatcacctggactatcaaagatacagtgtctaaaaaaggctcacttcctccctatcccaggtggtaacactgcatcgcaagtacagggcatcccaaatacagaacatccctaaccctgcatgcccagggcactgttctcagctctgctggtctgaccaggtagtttcacagaattcttgcttggttaacttgtagttttttgacatgatgtgctagataggtaagatttaggattcttatccatgtaaatgaaacttaaaaagaatttctcctgattgagttgcttagggtttttgtttgtttgtttggtatatatatatatatatataaaggggatgttagggctgtagtcagtggctgattatttgaaaatttcttcaacaatatgggttctgttctgctaattctcagaccaatgagggcctgtgtatgctagcagagagaggaaaagactagggttttcagattaggactctgggccagaatttgttaccatgtgaccttggaccactcatttaaccaaagcttcccagccattccccgtggaaaggaagtggattgaatgacctcccggtagcctcaccgggatattgcggctgcagcagagcaagggctgcatatagaagaggaacatgaagactttttccttacaaagtaaatgatatgaattgactgtggtaaagtttctaaatcagattttttttagtccagagggacagcttttaaaatgagagatttatttaagttataaggaaatatctgtcaaccctcagaaattgcaagatgattattttggttgtgtgtgtgtatgtgtgtgtgtattcctagtggagggtgagagcttgactcttaagaatcatataaaatatcaaattatctcaacttctgataaatagggggaaagacagacattttggggaggttcaaacctctataattctttaggcatttaaccccccaagagcagggactacatttattcattcgtagtgtcctccactccatatcagcatctggcacctaatatgcactccataaatctttgttgtggttgaatgagatcattttccccatgtctttgaaagacagaggcaaaaacagagtgttctcattaatggacagggttttatttcattttctttcccctcccccctccttcctttttgcctgtctgcctgcctgccttccttccttccttctttccttccttcctaccttccttccttcctaccttcttccttccttccttccttcttgcctgcttgcctgcctgcctgcctgcctgtgttaaataatctgaatgatttcaaagaatcaaaaatggctgttcacatttggtagggttctacggagcttatctaacatatttctaaatgagtactgtaacacatctggggccaggcacccaagcctgttcctgtgtactctctcatttgcctagaaaacataaatactgatacaggtcagggaagcaaactcttgagggctgtattaaaattctttttattgcaagcgatgtaaactcaatgaagcaaaaagaagatatttattgaaccagtacaaaaagcgcaagggcatagagattacataccctagagatcactggaagtggaacaagaatggagctaggagtctccttctcctaacactgcctctctctgcttgttttcttcattcacaccacagtctgggtacacagctggtgaagcctcaagatgcggcatagccttgcccttggaagagaactgagagctactctctggttgtaagtgaagaaatcccagcaaaggcttctggttggttaggcttaggccacatgcccacctgggtggccagtgaaacactatggttgggaaaaccttagaatcactgactgtagacgggagggctattcccttaaaggagggatgcctttcctagaaaggagggtgctggataaacaaagtgcatctctaggggtcagggagtagtcatagaaactatggaccaaaagatagcatttgctgaccaagaggccccagtttactcctaaatgttcagagggtgcatttaacttcagtgacttcaatcaattctgtaaattttggtaaacagaaaaaagcagaagaaatagacaaaatagaaaaataacaatataaattatgcaatcaattcagcctgatagtctactcactgagtatatgtcctaaagcaagaatcaggaagataatgaatcgcagttggtctcatttccccccagaacaaacatcttttcctttatctagtactgaaccagaaaagtagagggccgttccagtgctggagggaaactgtgctgggcttatgaagaggcaggtgccaaaatagtgccttcctagaagatttttcaggacagtcttgactatatgtgattttcactgtatacactgatgaattttagaatttaaacatccataaaacacggtgccttttaggctttttgtatgtgcatctgggtgtattattcagaatgaaatctctttactgaatctttcctatttatgagaattgggtggaaatgatcaggacaactaatgagtggatttgtgaggtgtgaggtgtgacaatattgtaacggaagattttgtgttgagcttcttgtgttttaatcatttcttgaaattctgcttgatgctttaatggatgtatttgattatagacacacaagactagcttcttttaggtcatctaattccattgtccagctaatccttacaacccaaaatattatccagagtggaactgaatactccagtaatcagggacacctcccattcaaagcaagcctttgatcttcagataactctgaccattaaaatgatgtcccctgtacattaagcccaaatttgaattcctataatttatactctttgatattatatctctttccagggtcaaagagaaatcatctaatccctctgcctcttggcagcatttcaagactttgaagagaccagtcatgtcgcaacaagtctctctgttatcttcccttgctttattttcaccaactgttgatgatgatgatgataacaacactagtaataacaattaacaataattgggtgcatgttatgtgccaggtgttctaagctatatatatatatactcatacaaatctcataaaaatcctagaaggtattatccccattttacagataaggaaactgaggcccagaaaggttgcataatgtggctcagagaggcgcagagagattagataatgtgctcaaagttatacagctagtgagtaacaaagcctaactttgagctcaggcaattgggctcctgagccttcctttgctaggtgacactactctgagtgtgatccaggttgtccccatttctcttagaataatgtccagaagtggatacaatcctacaggatctgcctgccatgaactattaatgccactcaagttttcattagccacatgctacacctccttctaaacattgacgcaaagaggagctcatccacttccttaacaaatgtggttatacctatgctattttcagtgtgtggagttaattcacatcaagccaatcagatcaatcaccacagctttttccccaatatttgggcagctaaagctagggaccgctatcatagcggagaattctcactgtgtatgagaatcatagtcttctgttgtggtaacgagggaatactatttccatctttggctgtggaatagctttccgtggctgctgctaagctcaggagagttagcaaatcatatgccttcattactatttggttctgtaacaggagtctttttttttaaatcattcatgacctaatctctaatattccctttaagggtttgattaaagttgagtacctttgaaaaaacactgacgtgattaaatatggtggacagaaatctatttacagtcaataagctaataaggcctggggtttcaagagatgtgaagcctgtgtgtatgtatatgtgtgtgtgtgcgcacatatgtgtgtgtgtgcacacatgtgtgttgaaagataaatagacaattttcagaattattttatgatgttgctattacaaacatattagctaactctggaaactggtctaaattgctgggacctaaataaaacatcttagaagacaattatggcattcaagtcagtaagacataatttgctttgttttcaattgttctatacagtcatcctgataacaatattccaaagctgttaagctcacattgcattctatgcaagccaataccactctacttgcacaatagtttcacattttcacacagaaaaataacattgtagaagtggcgacggcaaagtcattgtgccccagtgatgcccatgattaataaaaggtgacgtaggtgattaatcagaagttgtacatgttgccaaatttacagacttgtgggtttcagtatagatcactgtactttataaacctctcattcattcattcaataaacttttaaatgttcacaggcccattaagtactgggaatacaaaaaaacataatcctctactttcaccatgtaatcaacttaatattaccaataatggggattggtaagcaagtcagtgtcataatgtgcctcctgatatgatgcactggcaaggacatgatatcatcttgtggttcctgccaaacatgcttaacctcaatctaatcgtgaggaaacaatcagacaaatccaaatttgggggcaacatattaaacaattaaactcttttaaaatgtcaatgtcttgaaaggaaaaataagaaaaaaaggcagggaactgttggagggtagaaacatgataattaaatacagtgaatgatccctgattggatctttttttttttttaaatgtcattattaggacaacggagaagtttgaatatctagtctatattatatatgaataagtactttattatatgctatatattatatacttatgatattaagtatatattatatactaataaatattatatactaaaaagtaccagtgtagctttttttagtgtgataatgatataattatatgagaatatctttattcttaggagatacataataaggcattaagaggtaaaatgtcatgcctaaagcttacttttaaatggttctgttggccggaacagtgcctagggcactgttctcagctctgctggtctaagctctgaccaggttgcttctcagaattcttgtttggggcagtggctcacacctgtagtcccagcactttgggagcctgaggcaggccattcacctgaggtcaggagttcaagaccagcctggccagcatggtgaaatcccatctctactaaaaatacaaaaaattagccaggtgttgtgcctgtaatcccagctactcaggaggctgagacaggagaatcgcttgaacctgggaggcagaggttgcagtgagctaatatcgtgccattgcactccagctggggcaacaaagtgagactctgtctcaaataaaaataaaaataaaagtaaatgctttagtaaaaaagagattatatatggctatagtaatagctatattaacatatcttttatatttcacattatacatacattttctattaatgtctatatgagcatctatattgtgtgtctattatatctcactacatatggctatactattagtttcctagggctaccagaacacattctcacaaaccaggtagctaaaaacaaaagaagttattctctcacagttctggaggcttgaagtctgaaatcagggtggtggcagggccatgctccctgcaaagcctgtaggagaggaacttccccagtgtcctccagcttctggtagttgccagcactccttgtcattcctcggcttgtagttgcatcacttcaagctttgcctccatcttcatgggacattctctctgtgtgtctctgtctaaacttctttctttttataaggaccccacttactggattaaggcccatccgagttctatgtgacctcatcttaacttgattgtatctgcaaagacccaatttccaagtaaggctgtattcccaggtactgagtagacctgaatttgggggacactgttcaacccagtaaggtatataaagatattacagagggagagggagggtgtataggatgggagcatgtacaatgtagcaaaatattaatagatgatggattttggtgaaaggtaggtgactgttcattttgcccttctttcaatgattctaaagtttgaaatatttccaaataaaattaaaatttggggaaaatatactatatcaaaagaagacattgcctttgttcttcaggctatgtcgaagttatggaggacactggagcaaatgcctcatgatgatagcactgcagggccctgcaggaacagggaagacagcagacagtgccaactgtgcttgggaacattaggaagcgtttccatgagcagtgacagccggttgaacagagttttgaaggatagtgtcagagtcagcagcagggatgcaggtgcatctggggagctgccagttggccagaatagttggaacaaggggcgtgtgtgtgtgacaatggtggtgccgaggctggagagaggcaggaagcctgtcatccaggacgctgcaccatgaagactgggggagctgtggcagaactttaagcaaggtgtaacctgagcaaagttttgtgtgagggctggggctatgaagaagcctgaagacaaactaattggaagactggtgggacaagcggacaagccagaggagaaacaaggcaaagaagagtagaaagagagtgcaatagttagcaggaggtagagggtccgggcaaatgtttgtttttataagaagagagaaacgtaagcatctgtatatgccgaggaagaagagtcagcagatggggcagattgcagatccaggagagcagagatgatgaaggaagcaagtcctgggacatgggacccagaacacaatgggaaagagccctatttctactgggatgttgaggcaggggactggagagaggggaggcgtaggcctcagatcttctcaggacctcatgaagaacaagggagaggggaacagtgaccaggcaggggcagaaccgtggaagactgactggggtggacaggagaaaggaagagagtgagcccaaaggaggcgaaaacagggttactggtgagggaattgggaagcaaaatgatgagtcttggttcgaatgttatcgactcagggatcagtatcctgccttaattaacaaaacagggtttctccctgctgcatcctccaggcacacctggatggggcatgttaggtttcaccatcaacccttacaagggctgcttcaatagatttgtgcccaggattcccagaaaacaggtttccatgaatgccactgatacagagagttgggttagtgggtaccccttcaccctgcccccaagagctttttatgttagtttatgaaagggaaggacgtccgtcatgccattccatttaactgttaactatccaggggttacggtaacacacaaggctgatgagatgtgtaggctcaaaaacagagcaggccaaaggtaggcatgccaggacctagggctgaaatgatttcctctatcatgtggacataagtttccatttttctggaataaatgcccagaagagtgcaattgctagatcatatgttttgaaagaaactaccaaactatcttccagagtgtctataacattttacattcccaccagcaatgtatgagagatcaagtttctccatatcttgctagcatttggtatttgtattagtctgttcttatgctgctctaaagaactgcccaagactgggtaatttataaaggaaagaggtttaattgactcacagttccaaattgctggggaggcctcaggaaacttacagtcatggtggaaggcaaaggagaagcaggcaccttcttcacagggtgacaggacagagtgagtgcaagcaagggaaatgccagacacttataaaaccatcagatctcgtgagactcactcactgtcatgagaacatcatgggggaaaccacccccatgatctaattatctccacctggtcccacccttgacacatggggattatggggattacaattcaaaatgagattttgggtggggacacagccaaaccatatcagtattattactatttcttttaatcttagtgattctaacaggtatgtaatgacatctcaatgtggtgttaacatgcattgccctaatggctagtgatgctgaacatcatttcatgcacttatttaccatgatgtaacctctgcagttggatgtctcctcatgtttttgcccattttcaaattagattgtttttttcttaatgcaaagatttttaaagccttttagtaacattcttagaggcttttaaaaatcattcttccaagtacagaatatattttaattcagctctcagtagcagggtgttaactctaaacccatcattgcctcagcatggatgcaggatccaatcctctgttattcagcacgggcattttccccacatgtcacattcaaaaaacactgctacatcctcatctctttcccagccattacctgaactttacccctgagctagaatctccagagaagcttgaactttagcttctagagttgctcctgacctcatactttgctattgcaccactaagctgaaaccaagagttgaaaccaagctttgggaattatacctctttttctggatccacatgccctgtgatataaaaataaatgtcggccaggtgcggtggctcatgcctgtaatcccagcgttttgggaggccaaggcaggtggatcacctgaggtcaagattcaagaccagcctggccaagatggtgaaaccccatctctactaaaaatacaaaaattagctgggcgtggtggcaggtgcctgtaatcccagctactcgggaggctgaggcaggagaattgcttgaacctggcaggcagaggttgccatgagctgagatcgtgcactgcactccagcctgggcaacagaatgagactccatctcaaaagaaaaaaataaaaaataaatgtcagtgtgttcctttgtacttgttcccctgtgcgccagccagtttgtaatttgtctcctaacccaaaaggcaaagagtaaatgggaaagagtaggaacttgaaaatgtgactccctaaagacagtgggtcccctttgaacatcattaatttgcaggcataggaaggaaataaaagaatgtggaagagaacgtctacaggaggaagtcttgggtacactgtacaccacatgggacatagccttccctaacgtactgagagtctctggcaggttatttttaactgccacattgtcaagtaaatgtttgcactttgataagtgtcctgtccactggcttgttctaaactctggtctgggagcttaccagaagagcctaggagtggtatgcaagagagagagcctggatgagtgaaatataataattgtttagctgccagccctgatgtctatgacagatcaaacaatccacttgcattgtgtttcactgcttgcatcacctggtcatgagttttcagtggaatttgtggaatggattgttctcacggagtcacccaatatccctgaacaatggtagcatacattcttagttttatataagagctaataaggaatgttccagccacccgatcggaggcagagagctgttgctgatgcttgcctactttctttctttctttcacactctccctttctccttctcctgtctgaaggaagaaagaagggggcaggcagggaaggaaaaaagatccattatgtagaggtcactagaagagtgacaccacaggttggagggaagataaatatgaaatatggaaaataaggggtactctgtggtttttcccttcataaaatttgcttttatttatttattggttcttcctcagtgaataaccttctagaaaaaggcatcaggctgggcgcggtggctcatgcctgtaatcccagcactttgagaggccaaggcggccggattgcctgaggtcaggagtttgagaccagcctggccaacatggtgaaaccccgtctctactaaaaatacaaaaattagtttggcatagtggcgcatgcctgtaatcccagctactcgggaggctgaggtgggagaattgcttgaacccgggaggtagaggttgcagtaagccgagatcgtgccactgcactccagcctgtaacgtttcaggagtgctttttgttgcatgtaacagaaaactaactccaactgggtaaaacaaaaaaagagattgattaattaagcactgcaaaatttagaagtagtggtttcggtgttggtttgatttagtaacttgtcattttttctttaccttttatggtgtccatttcaaaggaaggctggctccatgcttcagggtttgtttccaaaaacaggcaagtccttttcacaactcgtggagacttgttcttaatactggatggatcgcccatgaccagccctgctggccagagaaatgtcacgtgcagattggctggggcttggctttcctgaaccaatccccacagctggtggtggaagggccctgttgatttagacgccaaggttcttcacaagggagggtgaatggatattggggcaacaactgcaatgcctactactacatcttcttaaaaagttattctaatttctgcactgatgattaaaatcctttaagagagcatcaagcctctcattctgaaacttgagataaaatggaaatagtaacagtgaattaatttacactgaaacatgttgcaggaataaatttttacaatcacatttgtcaagtgagccaagaagtaattttatttctctataattgaattagattaacttattatccccaatttctacttggtaatagaaaactatatctttctaattcaagataaatccaattacttcttgtttagaactcagtcaacttagtctttctttctttccttcttcttcttcttcttcttttttttttttttttgagacagggtcttcctatgtcctatgttgcccaggatgtacttgaactcttgggctcaagcaaatcatcctgcctcagcttcctaagtagcttgggactataggcttgctcatgctcagcaaaagccagtctttcttcagtaaattcttagtcaatataggacttctctcctttatctttctttctttcttttttttttttttgaggcagagttttactcttgttgcccaggctggagtgcaatggcacaatcctggctcactgcaacctctaccttctacctcccgggttcaagcgattctcctgcctcagtctccccagtagctgggattataggcatgtgccaccacgcctagctaatttttgtatttattagtagagatggggtttcaccatgttggccaggttcatcttgaactcctgacctcaggtgatccacccaccttggcctcccaaagtgctgggattacaggtgtgggccactgtgcccggtcttcctctccctattcttccaatcttcacttgaagaatgatcttggttcctgtggttcctacatatgatcttgacattaatgggtgggcaactgtgacgtcttccttgtgaggaggcctcctctgagatggctttggctttaggtatctatcctcactgccatctgccgctgatgttcacagtctaaacttgccccggtctatgcaaccataaggacattcccagtccattggatttctctcagccaaactattgttggagctcatggggaaggatgtcggggaaaccatgggaaaaattcagatgcccttctgtgctactaggatgtttctggaaacatggaggtggagatggtgggtctctcttagatagtttctctggctggacctgccctgtggccattgctactctactgtagtcacttatgttggcttagggctctccatgagaatatctttttgtaggattctttttttttttctgagacagagtctcgctctgttgcccaggctggagtgcagtggtgccatctcggctcactgcaagctccacctcccgagttcacaccgttctcttgcctcagcctcccgaatagctgggactacaggctcccgccaccacacccagctaattttttgtgtatatatatattttagtagacacggggtttcaccatgttagccaggatggtctcgatctcctgacctcgtgatccacctgcctcggcctcccaaagtgctggggttacaggcatgagccaccgagcccagcctgtaggatttttgatggagagtggaggcataggccctcctgctccaagatccccaaacccatctgaggtttctattacccctacgtacaggactggactttccaagagctaccccgacttattctcttgctctatttcccacttctcctgctttgcttccagtccagcgaagattttttaaaaatcgtcactgtctagtctggggaggggagcttatataattttgcattcttttgaatctcttagttatggcataaatcctgctatttagtagttttgttctagggctggactccagtcatgtgatttggagtgattttctcagctttagcaatacagaaattgaatagcatggtatgttcaagctttgcttcttattaattttgtttgtagaaatacactgggcacaatttgtgctgggggtcctgatctagttctcttgaagtgttcagtaatatgcggagatctactattcacttttcttcagagattctcatttttaacattgaaaagaaatggtcttgtctgaaaagcttttgcttgccacgcatatggaaacgcatttaggaataaatgactactgtttctgctgtttcggcaatgggttattgtgataacacagagattaacaacatgttggataaacattggtaaagcccagctgtatacttttagggcatggttttggaacttcatgttcatttctctttatctgtggggtatctgcttcatgaagtggtacctacaagtttagagcttgtagaacaaagccttgatcagctgctgtgatggccatgtcacagccacagcttcatttttcatcctccagggtcttgttaatctccttcagtgcttaaccgagagtaattccattgaaatgggttggagttcccttagaattaaaactcttatgtgtattggtctgctatctttagtctatttcattgcctttcctcttttctgagcagatattggatctaaggttctaggtgaagaagcaatgaacactcataagatgaaaagtataacttggaggaagaaaccccagggaaaggttttgtctccaggtaaatggacagatcacatgagatctttaattcccgtgcctgtacaagcttccataaatggaacatgtagcagagaggaccagattgacaagaagcactcagaagagaagcctgtgcctccatcctgtggctggctggggaccatcacacacgggaggctgtgtgctgaggaatgggtgtttggaggaatatcctcctaaccagcttttcagtggactcagatgtataaaaagaaaaagttgccaaggactgtacttgctttcccagattgtcctagggtacattgcattagcctaaaatggcaaccctctatcttcctagtgtaataataatagcagtgctgtttgcttggctctgtgatttctacccttaaaacccttgcactcagtgtacatatagcagaaacttcttacagtataaccagtaagattataggatttctattaatacattagtcaaatggtaaccctaaaagcactgaacattgaaaatacaatccaataggataacccagtaacgtgagcatttgtcctgtgtcccaacaccagcatcacaaagcgactcagccatagtcactctccaaataaaaaaatatataaattcatcctgtggagctgtgcgtgagaattttacaacattacacaaattgatggtgcccctcagtataaagagcacagtctttgtagacacagccttgggtttagcctcacactggtgactttcttaaccctggcaaggtaattaaccctatccaaaccagagctttccatctagtgcaccacgaagggtttacagatgtgctgagagactggtcctctcagttcttgaggaggtacttgctgtgatgtgaaaaagactagaaacatcatcatcatctcagtttcttcatctgtcagtcataattgtatttttctcatggggttgctataaggaataaatattgatctctgcaaggtgttcagcacagcacttagtaagtgattaccaaatgacagtatgtctagtctatacagtcctcagccaaccagtcactttggccagcatttggaaaatgtctgaaagataattaattccaaactattgcacaaagagaatcctgaaagtcgtgagcaaggccatcaaacaagtaattccactccagaaaagtcaggccatcctagatttaatataatgatggccattggaacaaattctagctttgcctgccaagttgctcttttttttttttttttatactttaagttccagggtacatgtgcacaacgtgcaggtttgttacatatgtatacatgtgccatgttggtgtgctgcacccattaactcgtcatttacattaggtatatctcctaatgctatccctcccccctccccccatcccatgacaggccctggtgtctgatgttccccttcctgtgaccaagtgttctcattgttcaattcccacctatgagtgagaacatgctgtgttttgttttttgtccctgcaatagtttgctgagaatgatggtttccagcttcatccatgtccctaaaaatatggaacgcttcacgaatttgcgtgtcatccttgcgtgggggccatgttatcttctctgtaacattccaattttagtatatgtgctgctgaagcgagcaccaagttgctctttaaggcatccttctttcacagtaagtagctagaaaagtatgaatgcttcggttccctattccactgaaaataaaatgatttcctcaaatttgagagctgttacaatttgtttccaatatacagtggtacccctgatccacaggggagacattccaagacccccattgggtgccagaaaccatggacagtaccgaatccaattgtcatcagttggaacacatttctgtttgtgcctttcacccaaaacttaatgccttttccatcttaactcaacacttatcacacactgtggccataacttttgcagttggaggtgtgatagcaaaactagcataaatttgtttttccatcttcccaatttcatggatagatttattcttactgtagattttagcaacctcagcgtacatttttttttctaaagtcaagaacttccacttttttacttcaccatactttatgtacggtttctctctggtgtatctgagagcatcaccaatgctctggtgattgccagcatcactactcctacactttagaaccattattaagtaaaataaggggtacttgaacacaagcactgtgatactgcaacagtcaatccgataactgtgacagctgctgactaatggacaggtggcgtctatagtgtggatacactggacaaagggaggattcacttccctgggcccagtggagttgcacagtgcaagatttcataattctactcagaacagtgcagaatttaaaactgatgcattgtttatttctggaattttccattgaatatttttggaccatggttgactgaggatgattaaaactacagaatgcaaaaccattaataagggggaatcagggcccagattattatttgtcctcatatagctgggtcttgatgagctatcattttattttgttttacctctgggtgccctgggcacagttccctattctgtgcctactctggggacacatatattaggatcagaggtggcaagactatctgtaaaaggaaattgaaaagacatttaaaaacctaaaggaagattagtgatttcccagagaaactcaatggcagatgtcactggaatcaagaaccattgctctcatgcctggaaaacctgtttccaaaatgttcccttttgctgccaagggatcagctgctccagtagctcagcatcttggcaattgtgggaagaggacagaggtgaagaatctctgggcttattagacatgaccttagagaacactgatgtgggaaagcagagaatgaacttacaatgagtgcaggatgtttgaaagcaatacactatgaaaatgtttcatattttaaaaactaagtaataagcatgtaaaacactaccttctctcctaaaccaaatcagctgtttggatgtaaaaaataataaccaaatagtaaatgcacttaattttttaaaaggagtttgctgggaagctattaatgaaatagaaattgaggaagtcttactcaagctgcgttttgtttttggaactgcagaacacactcccgtgtctcgagtagtgtctgagaacacagaaatgggaatctgaatactgggtttccaataactgctttgcaaatatttagctctatgaccctgggtaggacaaagacaatcttgatgcatcattccacacctgtaaaattattatttataaggttcaagagtctatggcatgaaattcagagactcgggggtccaataaagagattatgtatgaaaagacctggcccagtgcctggtatgcagtaggcatgccatgaggtagccttctggtgtgtgtgtaaagcacaaacccccaagatttcagggctgagtggagccttatgggttattccatattttctatttgtctttgtatgtttccattctgacccattgtgcatcgattttaaagattaaactctcataaaacaacctcatgttctgcatttctaagctattgggggcagatgggaccttcattgaaacccccaagtccaaacatatgtgtttaccatggtcacagcctactatgtggcggataaattgtctgtttagttgtctatgtcccttgaccaagaatttcttgacatacagggactcccactttttgagctccgtagcacatctgatgcaaagcagttgctcgatatatatttattgttgtcattgaccattaaacatacaaaaaaagtagtctgattgaattgaatttagacgtacgtgaagaaataataagttaccagaagagtggtgtcctggttgaaatgggacacataagggcaagcacttgccattgtcacccagcccttcagggtaagcagcatccttagcccacagtttctcatcatgatcacaagagaaatgcaatctctgatgggtactctacccattgtcctgggcctacctatccacagatctattcctgcacctttcccagaaggctaacccctgcaggctatactcagtctccctagtcaactgacttcaaaaaggagaaattggcacttaacatgacacaagctctgctgtcctctttttgacttcctcttaaggaccatggaaaagatttactccccagatccatttttgcatgataattaaagggcccttgtagcaaatggactaagagcttcccaggtccagctcaataccccttccttccaaaagatcatcctattcctgcctggcctcagtggttactctctggtctgaacacacatagcacttccagtttctaattcatgtttaatacttgaaatctactaccttgcattgctatttatcttttttgtaggcctttccttttcaactagactataagagagtagactccattaactacatgttttgtatccgctaggcctagcacacagtaggtactgaaaataccagttttttataatggtactgatgaagaaaagtaccattcccactggatgttgttagccattgggagggctgtgcctaatggactttgaagttcacctgagcctgaattctgattcttcccccatatttgatatttaacttggggcaaattatttccattcctctttgaaaatgggagcaattctctcttaggattatttggataaaatttattaactttagactgattagcaccagggaaacaatcccaactggaagttatggtgatcttgatgacaataataatacttaaggggctgctgcataatatcctgaccaacatttcatcccaaatttccactgtaggaagtagaaaccagatgtgcccaaacattttaaaacagctattttattgaagtaatttcatgtttatggaaaaccagcctgcaatagaaatcagcccctcacttatggttcacggtcacttgatgaatggcccatcatcataaaataagcagggagtttggctgggagccatgccacaaccattttattggaatgactttgttgtcactgcatccccacactcatctctctcctacagcacagttttgagtgattgaagttagtttgggcaagaattccagacagggaaaagcaaataagtgtgtcaggaggtcaaaagagaagaataagccacaggcggaggaagaaatgcggagctgataattgaaagataatggatgtaggggtgggttacagcaacacagtgggagggggatccagacccagcgctttctcaggcatctgagcgagacccagggttacaactcatcttacaagatctatgaagcatggatttcaaaatatttgggccacccagtatggaatttgggcaaatggcactattgaataaagccattgacaaattactttcctttcatttccttcactggcaggatcttctgtttatgcctcctgagatgcaaaactggaaggagtaaatttgctgacaagtatccatgtgcagggacagttgatggaatttttatcatgcaaaaatagtcttggatgatgggttgagagattgccaggaatctctggaatctaaccctcagctgagcatatagaggtttcattttaaggtggtatcaaggtgaagaacttataaaactaagctgtattgattttttttctttgcaaatgtttgaattttgtaataggcattcattcccagcgaaatcttaactaaataggaggctggaaatctgtgacgtagtggaccaaggttaggttttaaaggtaggactttttaatcagacagctgactctagaggtttatacaagatcataactttaatccctccatgcccctgttgtcttatctgtaaaataaatataataatcatcatcccaaaggttataagaattaaagcaaattataaaggaagtagcccctggccttaggagaccctcaaagtttaaatgtcctttttcttttcacttctctctcttattttaactccttcctatccagctccagcaattttctctgattttctgtgtatctgatggaaacagcctttgctgaacttataaataatgcaggcaaggctgggcgtgatggctcacacctgtaatcccagcactttgggaggctgaggtgggcagatcacctgaggtcaggagtttgagaccagcctggcaaacatggtgaaaccccatctgtactaaaaatacaaaaattacccaggtgtggtggcaggagcctgtaatcccagctactcgggaggctgaggcaggagaatcacttgaacccgagagccagaagttgcagtgagccgagatcgcaccactgtactccagcctgggtgacagagcgagactccatctcaaaaataataataataatgcaagcaacatgaaagagaaaaggaagtgagccatgtagctactgagagggaggtatttcaaagaaagagctcatcaagtgcaaagaccacacagtagatgtgtacatggacatttcagaaaatctcaaggaagccagggtggctgaagtagaccaatcccaaggaagtatggtaggagaagaggtctaggagatccagaggggcagagtgtatgattgcctagggccttgaaggccagtaaaagtacttgagcttttactctaagtgggttggggagctgctagatggttctaaactgaggagtgatgtgttttgaaatgattctcctgactgctatgttgagaatatgttatagggcaaggatgtggaatgaggaggagagggacacataggcagaacagggacaccagttaggatcccactaaataacccaggcaggaggtcagagtaggtcagtagcagtgtaggtcatgagaagtcattagaaaaggtagagcaatttaggctttgctgatgggttcaatatataatgtgagagagatccctttaagatttttggtgtttatgaaggtgctttttagtgtaggtagttgttaaattggtgccctcacagggggcattgggggatgatgggtggagccttctattctgccgccttgctccaccccaagtcagtagtgtttttttagggcatgataaattgaatattctaaaggtgattatggtgatggttctacaactctgtgaatatactaaaaaccatttaattgtacattttatcttattttatttttgagacggagtctccctctgttgcccaggctggagtgcagtggcatgatctctgctcactgcaacctctgcctcctagattcaagcaattttcctgcctcagcctcctgagtagttgggattacaggcatgcaccaccactcccagctaattttcatatttttagtagagccagggtttcaccaggctggtctcgaactcttgacctcaggtgatctgcccgcctgagcctcccaaagtgctgggattacaggcgtgagccactgcaaccagcctgaattgtacattttaaaaggggaaactttatggtatgtaaattacatctcaataaagctgttggaaaaaaagaaaaggaggaggtggtcagagactgagatgcttaaaattgagattagggaagatttccacattggcaataacaagagctagagtctgaccatggaagttgagtagccaagatggcttggaggaggagtcaaggaagacagaggcccaagtactggaaggacatctgtgaggatatgggtgtcactaagaatggtggcaaaagtcatgttggtgagaggtctgacagtgagctggggggaaaatcttcaccaagtcaggagtgacctgagagtttgcagatgactacaacaaggaagcatggcaggtaggaatctgatagcaggatgttccaactgggtgtgggtagaaaaaatgttctgaaatttgaatattggtgaaggacttaaaaaaaacttcaagtattaagggcctactctacttttcctttattaattaattcattcatgcaacatgtatttgttcttttggggacaccattatctactcatttggccatatctgcagatgctcccaaacatggtggagctggcttttgatggccagaatcccagattctgttataataatctcctttcaatgagttccccaaggacctattacccactagtatagtggagggctgttctgatcagtatgcagcctttccttgatcactgtcatcatattggccatcattgtttagttacactaatatagtatatggctttatgtttcttaggctgtagggagctgcctgttttagaattagatggaagaagttgtgataagctttgcctttggacagatctgggtttaaatcttagctctgctatttataacttcataacttcgggaaacttaatattgctgagtcttagtttcttatctacaaaatatttacctcataaatattggtgagaattaaataacatgtgtgtgtcaaactccaaacagatagtaggcacaaccagagatgttagttctctttcctttcccttgttttccttccttcacctttatgttaatgttgcttctgctattttatttctagcttctatcatgtccagggtctgggttctgatcagaagccttcctctagggatggttgaaattatcaagccaacttccagattggcatagagtcactctgattgtttactttagtgtgccatgttatgcttctcaaggtgttttataaaatgtttctaatcttactctttaatactgtgaggtatataagtgaggcattagtattcctaatttatggaagagaatataagatactgaaagtagctaacatttattgggcatttattaaatatcatttttctaaatgttttacatccattaactaacttaatcctcgcagcaattctatgaaataggtattattaactttatctcacaggaagggaaacaggcacagagaggtcaaataatgtgttgaaggtcacataacttctaagcatgggggccagatttgaacccaggcagtctggttacaaaacttaaccaatatatggcctctaatgtaagacaagtaaacaaattgtgtgggggttgcaagtgaagaaatccttttaccagttactgctcaggtatctttctggcctctgagatggagtttcgctctttcacccaggctggagtgcagtggttcaatctcagctcactgcaacttccatcttccgggttcaagccattcttctgcctcagccttccaagtagctggtattacaggggtgcggcaccatgcccggctaattttcgtatttttagctgagacagggtttcgccatgttggcctggctggtcttgaactcctgacctgaggtgatccacccacttcagactcccaaaatgctgggattacaggcgtgagccacagcacccggcctggcctctggaatctgatggagatggaaaatgttggtagctcactgtggtcactaatagaacactattgttatcttcagcaggagggaggcattccatacctcctgcatgagttttattaccctgtttccttctagctcagccacccttgagaattcttttgctgagacaaacaagacaatccctctgagatagtagcaataattgccacccttgtcctattttagttctgcttgttgcaagccaagttctaatattaaagccagtactaaaaaatcataaactttctcaatatcataagtctaaacacgtaggggaagctttggaaaactttaggaaacaaataattcatgaggtcaaaatcaatctcataatgaacaagtagatttttttctttggaagcggaagaatatctggcctaagatcgaaccattggacactcatgaaacttatcttagaacagtgaaactatctagtcagtcacattgtggattatttactaagtgctagaaatctcatagttaaagcatttcatcaggagtagatgatcaaatatttaaaatatcaagagatttgttatttttcttcttgctggcactgatttagtttctaaccactagaatttctcccagaccaggagtagggaaaaaaagagaagagaaaactaaagcctaactattttagtatgttaataactttgatatgaatctgatgaagaaagagttgaaaattattagctaaaatgagatagggcatgtgtgtgcctatatgtatatttaactattgccctgtgagccctattctatttgaattggcaataaaaagtggacttaccttatatacttgtaaaatgcatgaaatacatatacaatttgttgacttatttattttctaaagactcagtctctccactgatgtagttactgaaaagaagttctcttttccttatttgtaaaacgttttacatatacatcccctatatgtacgttataatagatgttctacacagatatgcatattgcatatacatattatgtttccatgaataaatacagcagaatttcagtctaaggaatgaaaagattatgacttaaacataaaccaactggagcaattcaaagggtctttcttaagaacatggaataaacgtgctaagatggctgaaattatttaaagaattaggtaaaatatacataaattcctttaaatttaaagaaaatttttaaaattaaataaaatataaatgaatgcctcagtctttgatctgaatgcagcagaaaaaggggattgaggcatggctgggggccagctagccttggcctcttgctctctgaatggccctggtccatcccctctttgaagctgagtagagttcactgggctgaggcatacaataacggcaggggcttggggaattcataagagggaaaaaagtcgcactgcactttctgagaaggccgggattcacatatgtgggcgcacacacacacacacacacacacaccaggaaatggagagtattgcccttgtcacagaataggcattcttatggcccctccacacatttcaagagactttgagaaactagtttggggctggaactgtctcccatgccctttctaagatctgagagcccagtgcccaatttaggagagttcaaacaccaggaacacaaaagactcaatttggagtgcagcggcctcttgtctgtcaatcctgtttgctgaacctgctcctccttcagggtactaaaacgggatggagcagaggaaggactgggatcaaggataggagtcctctatgatggtgctcattctccctccataaggagcagatgttacttctcttgaggatgtgttatttcatttcctacctccccctacaaacaattgtgatgaggaggaggaggaggaggatggtgataaaggccaacagcatttattgatccctgactgttgggtattatgctaagctttacattcatcaccacagtctactttcattccctcaataatccccagcagtaggtgccaatatcctcaccatagtctactttcattctctcaatattccccagcagtaggtgccattatcctcaccttccctgtttctctggaaaataaactgaggcttagaggaaagaattaacttgcttaaggtcacacagctagtaagtggttatggtaggtagaataatctccagagatgtccacctcctagtccatgtgactatgttgtgttacgtgccatgggaaataaaggttgcagatggaattaaggttgttaatcagctgacctctagattggggagattctcctagattatcttattgggccaaatataatcacaaagatcctcataaatgaaagaagcaggagagtcagtgtcaaaatggcacagagtgagagagacttgatggccattgctggctttgaagatgaaagaagccgtaagttaggtctgtggaaggctctggaagctagaaaaggaaaggaaaccaattctaccctggaatctccagaaaagaacacagctagctgacaccttggttttaggctagtgagtcccattttggacttctgacctccagaactgtaaaatactaaatttgtgttgctttaagccggtaggtttgcagtgatttgttacagcaaccagaggaaactaatacagtggtaaagctgaagcctgaagtctggccctagaccttctggtacagagctgtgccttgctccttatagtgcaggccttggtagaaaggaatagaccactctgctgaacagctccaccagacaggcccaaaggcctaagagacacaaaacagatcatgaacactccaggaatggcagacattctgtccccatccagccagggaatggtggggtggggtgagcaagttctcttcaaaacgctgaatccctgggaccatggcatttccccactgatcacattcattctgtctggtccttcaaggaggtaacagactagtggggggcacagtcaaggtaaacagataagtacctttccatgggatagtgctatgatagagtttatggaaaagcatagaagaggcatgctaccagtttcaggggcttcaggagggctccctagggaaggtgatcactgaactgagtcttgaaaggtgagttagggggttgtgaggctgagggtggtagaggaggaagctgcacctggaaagtcctggaggtatatgagagtgtggaaagtcctggaggtatacgagcgtgtggcttacccaaaagctgcacatggatttgacaggactaattgagtttttatttgtttgtttcatcctatcactggtaagacaatatttgtatcagtcagaagataccaggttaggctacagtaacaaacaaccccaaatctcgtggcttaaaccacaggtttatttcatgctcattctacatgtccatgatgtgtctgcagggcagcagctcgttttagtttcccagtgaccctagcttacagagtggtcatcatctcaaacattatcagtcaccatgccagagggaaaggaaactctgaaggatctctgcctggagatgacacgtgttttttctgctcaaaatatgctgacaagaaatgtttcatggctctacccaactgcaagtggcccagcctagaactcaatgaaaaaaagcatttcctctgaagccaaggtggagagccaggaatacttgttgaacagaattaatgaccagcactgtgtttgttagccattttgtgtgtgacactgttcaaccaaacaccaagcaatttagaaagactggtatttaccttcttagacttcttattagccactagtgccctaagtcttctctaatcgtggatttcaataccattatcctcactgttccacaacaacttcctgtttttatattatgcacccatgacttttctaagaaagcatgtttctagtttgcttttgccatcaagaatcttagagccaaatttgcactatagtacgttccaggtagcccttattatctgcaaacagttggtaccagaaaaagtctgtctaagggaatccattgtaaaacagggagcaaaatatgatgttagattatgcagagttgaaaaacaaaacaaatgagtatgaaaataaatttacttaattttacttttaaaacacttatatcacattgcaaccacgtgctaattctcagcatgaaaaattaaccatgttgactttttgggtcccactttcctcaaaaaattttaagatagctcaatggctttttttttttttttttttttttttttgatgcagagtctcactctgtggcccaggctggggtatagtggcacaatctcggctcactgcagcctctagctcccaggttcaagtgatcctcctgcctcagcctcctggcttttttttgttttgttttgtttttgtatttttagtaaagatagggtttcgccatgttggccagtctggtgttgaacttctggcctaaagtgatctgcccacctcagcctcccaaagtgctgggattacaggcgtgagccactgcacctggctggtttattctttatatattgcctcttttgagagatattctagttaactatgcaatggatttgcattctatttgctagttgtattggttgtttgcaatcccacagcatagacgttgatggaacagcaggaaattggagctggtgctaaactgcagaatctgttagagcggggccttcttttacagctggtctcttcactagtgaatatttctgaattaggaagactttgcctccctatgaaaccctgtaactgtggagacctggataataaatacctagatagagaatgagaatccccatgtgtggaatgcatttcttggaattaatcttgtccttggcttttattttatcacttttttcctttttgttcagattccctctactattttctttttttcttttttttttctttttttgtatttttaaggagttgcctcagatcttttctaacaggaggcagggtataaaccaacaatggacataaatattgactacccaactttttaattatccccaaacttgttttttcagaatcggccaccttggggtagatggggtctgtgaacttttcttaaggcactgagcggagttgagtggctgaagatgcttcagtgaagcttgatgtttatcctacccttgtggtcagctccttcctcccagggagctgtaaatcaagaactgtgggtgtttcttgattttccggtgctgcagctcatttggatggtccatagggtgtcactgggtaacttcctgctctgggacctctctctgaaatagaaacttccctccaaaggagagactgtctcctatttcatttataaatcaagttaactctggttctttgactttaagaaaataacctatctcctcctctcagcaaatttcttcctcttggtctcatgcatgcagttgctaacacatgtattcttgtggtggaaacagtagaaaagtattaaacctttaaaataaaaccacaaaaccctgcaattcatgaaacaaacctctatggagtctttgctctttgtaagggactttccgtgtgtttgttcatgcaatccttacaccaaccctatgtggttagtcttattgttcccatattaggtgtaggagatggatgctcgaagaaggtgcaaatttcgcccaagatcacctagtattggaagtgggatttatacctatgttggtctgactgcagagctgcccatctttatacacctcaccactgtctcacctcttttcttatgcttcccagccaggttataaaacttggaaaagaatagcatacctcctatctagaaaataacaaaagaaagtcattctgtaatttctaaataatactaagtgttacatatgtattttaatttaaataaaactatggaattttccctgatggtcatcttaagtgtgagaaacacacattttcacttgtcagggtggtcttatagtaatgcagagcaaacaacattatctatattttatagatgagagacccatccagggtcctgcagataaaagggccagagttgggattagagcacaggattcctgactcctaacccagtttactttcttctactacaatataccccatttacgaccccaaataggaatgttcaacagtataaatgtaatgatttaggatgagatgagaggtagatgggaagaacaggaggaatcacctctgtaccctgtggcactcattgcaacccatggaaatgtttctgttttaaagtccagcatttagttctggtgccaaaacaatgctgagtaatttcgtagaacctgagaaccagagaaggatcctgggaggaactttttgtttatttgactttatttcattggcctcactttatgttcttttcaaaaccaagaatgcccactgggttgtgagtaatgacaatttccagacaatagaaaataatgcccaaacggctttgtttgagagattcttgacgtcttttgttatccacctacctttttatctctacattttgctcattgcttccatacaattatcgcacttatagagagcatatttttcctcaaaccgccaacttcacaaaacagcaaatgatttgtaggttatgttgcattaactgtgagtgactgaagtgcccctcaatcacatacccctgcctttatcttcatctaggaatgaaagtagccaggaaaggcaaagaaatcattcaagaatttaaacataaaaagttggctaaattctgctgtggtagacttctaccggatgagtttaatgttaattaaaactccaagtggagttgtttgtaaatgaatcattccctgttcagtttgatgtagcaaggtcagcttcctgctccaccggcagtgcgtgccagctctttttctcatgtgtaagctgtgaatgctgttaagcctgtaaaccactataataggttcagagattttaggatccctgaaagagaaggatcagaacacagcagtgttgagtgtcaggtttcttgggcacttgaaggattaggcaggacaagtgaagtgttactttagggacaaatgtctgggcgattctcaggcagcaggctggagaatgtgggctctgaggttagtcttgaattctaatcccagctctattgttttactgactgtgcaacatggagcaagtcattgccttcttctgagccttggtattctcatttctataaaaatacaattataataaccttattgtgttgttgtgacaatttgatgcgataaagttactggaacacacgaagccctcaacatctggttgcaatcatgatgataattaatgtatctatgcaataaatagtgggcactgctatgtgctccatgctgttctgggcgtcggggatacagcagtaaacaagacagacacaaatccctgccttcgtggggctgacattccagtagaggacagacaataagcaagatacgtaagtaaaaaatagagttcatggccaggcgcggcggctcatgcctgtaatccttgcactttgggaggctgaggtgggtggatcacttgaggtcagaagttcgagatcagcctggccaacatggtgaaaccttgtctctactaaagatacaaaaattaactggatgtggtagcgtgcgcctatagtcccagctactcgagacactgaggcaggagaatcacttgaacccaggaagcagaggttgcagtgagccgagattgcatcactgcactccagcctgggtgacagtgcaaggccctgtctcaaaacacacacacacacacacacacacacacgtcatgaattaagtgttaatgagaaaataacaatgcggaggaagataagtagtattaggggaggctgaaattttaaagcggtagctaggaaaggccccctctggaagacgaatttgtgtaagacctggaggaggtaagggaaaaagtcaaatggttccctgggggaaaagcattccaggctgagggaacagcaagtctaaggcccctgaaggaagacagtgcctgccatgctccctgtgccgctggaaggccaggggctggtattgagtgatccagtggagaacactaagaagtgaagcagcagggaggtcaaatccagcacggcagggcctttggtacagagggaggactgcggtttctcttctaagtgtgatgaggagggtcacagggagggcacaaaccctggagaagcacaacacaggaccaatccccataacagcagctccaccctttctcacttagactgggctagagtggttaagcatgaggaaaagagatgggcctggctttctgtgcctcaaagcaccacgtcaagctgtgacataggcatccaccactcttcctttgtgcctacacctgtatttttgaatgtactctcatcacagtgtatatcaccgtgctgttcttcaaagtcagtttccccagtatttgttcaataaatgtttaccgatcactcattacgtgcaggcactatgttaggtgctaaatagtacagtgacataaaaggctgtaaacaattaaaaaatcaacgcctcttatgtcagaaaagtaacactgtgtcatcaaagcaaagtcgacttctcctataggtgtgggtatatttaggatttgagaagggaaaaagcgtgcttagcttccgggctccaatgtgcggatatacaccctctccttagcttgttagcttagggatttcccacccagttgcacacggtgtgttatctgaagtcatttaacctgttgacagtcgcattcttggaataagtaagttccatgcaggtgaacttggacaaacaatgccagtaacctttttagctgctgaagtaattggtccaaaagtttaaaataataagcttcattttccactgaatcttgttgacagagagtatcagcagggcttggagttagaagagtctaaatccctgatgaatagttcaaaaaaattactgttaaactttttgtaaacaaggtttttttagtcataataatgtttttaagataaattgtgtggataattggtacaaacttacgatgtatgcatttagttagcctcagtacaatcaaatgtgttgttaccagtgcatcaacaaatgcacctcaatatcttaatttatcattcatgataataaatggagacaacaccatagattaaggtaattcacagccttgttctagccaatggcttcaactttctttcctttttttttttgagatggcgtctcgctctgttgcccgggctggagtgcagtggagcgatcttggctcactgcaacctgtgcctcctgggttcaaatgattcttctacctcagcctcctgagtagctaggattacaggtgcgtgccaccatgcccgcctaatttttgtaattttagtagagacggggtttcaccatgttggtcaggctggtctcgaactcctgaccttgtgatctgcctgccttggcctcccaaagtgctgggattataggtgtgagccactgcgcccggcagtggcttcaactttcttggcaaccaagtttattgtaggagtggccaacaaatatcacatccacagacactgatgctaccaaatagaaaggtcaggaaagggccagcagcaacaaagagggaggaggggaatgtgagggtcctaaggaatccacaggctgatggagcatcccttaatccagttaactgaaatgagttagactaagagtctacacttggcccccagctggctcaattcaagtcctcccttggacctactgggactccacctttaggagtggatcctctggaggaatcctggcaccaagcaaacttcccagggctcctttgacttgctggaaattggctgacctctgagggagtgttgtttaaatggatcaatttaagcacagaaagaatccagcctaattttttgtgtgtgcgttttaatttttttttatcagtataggctctctgacatgtcccagtgaatgtgcatgttttttaagtacaatgatatgaaatatattaaaagtatactagaatataaactctgggaaaggagagaacaccgtgtttcctttgttgatattttcccagccctagaattatgcctgccaatgatagatgcttaaaaaatacttgtgagatgaatgaaagaatgaatgtgttcaccaagtttctgacctcaaagagtttaggacctagaagagcagatagggcatggtcagaaatacctatgacaaaggtagtgactgaggcttgtcttaagacagaaaccattaagaggagaggatgaaatagattctgcctgggttgataaggagacatttcataatggaagagtatttggaggaaaaaaggaggaaaaggaaactagaaatgtgggatgggccttctacaaaagatcactgttgaagaaagcttctaaaaatcttctttggtaataattaaaaccccaagacagcacaaatccctgagagacagtatggagagatgtgagaatcaaaacatgaagtaggggcccatgaaatgtttgacaaataagtgccatttcaaaaacgtcatcccatggccaggtgcagtggctttcatctgtaatcccagaactttgggaggctgaagcgggaggcttgcttgagttcaggagttcaagaccagcctaggcaacatagtgagacctgtctccacaaaaaataaaaaaatttccccaggcatggtggcacatgcctgtgatcccagctactgaggaggctgaggtgggaggattgcttgggtccaggagtttgaggctacagtgagttgagatcacaccactgcactccagcttgagcagcagagagagaaccctcacttgggggctaggatgaattttttttcgagacagggtctccctctgttgcccagactggaatgaaatggtgcaatcttggctcactgcaacctcaacctcctgggcccaagcgatcctcccacctcagcctcctgcatagctgagaccacaggcatgtgccaccacatccggctaattctaaaagtgcagtgcaaaacgaagagattgtgaggaactctgtaaatacaaaaggttaaagaaatagtttataagaacagtgaacaacaatgaaactctttatgacagtcttccccataatgtttgctttcacatcaaatcagtcatgaggacatgatataaactatacaaatgagctttcttgacttccttttttaatataagaaattgattgtttcctaggtctcatttcgttgaaattgttggcaaataatactgaagggatgcaatttcacaaactgcaacatgagcaagaccgtatctacagtgttcatcactgtactcgcagcttttagcaccatagctgaccacagtagtggctgttcataaatatttattgaatgaacgaaccaatattttctgagtaggtcctgtgtgcaaagctctggagaggcatgctgggggaggaaaggatggagtcatgatttctcatgaagtctcttcaataacttcacagtccaaggtggggaggggtgggactgtgagtggggaacagacatagacataaatagctttgctgaaattcagggtgtgtaaccacagcagcaagttcaagcagtataaaaataataaactattagatgtcactttacatttatatattattttgtccacttgattatctgaaaatgggaaaaagaagaattattattattatttttttttgagacagagtctcgctctgtcacccaggctggagtgcagtggtgcgatctcggctcactgcaagctctgcctcctgggttcacgccattctcctgcctcagcctcccgagtagctgggactacaggcgcccgccatcacgcccggctaattttttgtatctttagtagagacggggtttcaccgtgttagccaggatggactcgatctcctgaccttgtgatccgcccgcctcggcccccctaaattgctgggattacaggcatgagccactgcgcctggcctaaatttttaattgttatttataaaataaaagctattttatatatattaaaatagtatatattggccaggcacagtggctcatgcctgtaatctcaccactttgggaggccaaagtgggaggatcacttgagcccaggagttcaagaccagcccaggcaacacagcaaaagcccatctctacaaaaaatacaaaaattagccagacctgttggcacacgcctatagtcctagctactcaaaaggctgagatgggagaattgcttgaacccaggaggctgaggttgcagtgagccaagactgtgccactgcactccagcctgtgcaccagagcaagagtctgtctcccaaaatatctatatatgtatatagatatatcaattatataatatatgtatatagacataccaagcaattatatatgtatatacatatatctatatacatatacattcctcattatgtttgctatatacatatacatatatatagatatctatatatgtatgtagctatgtctgcatataatttgtatatgtaatatatgtatatatataattgcttggtctattttatgtatcttgagacctattgaaggtttttgaacatgtgggcaattctggagagtaattactaaaaaaagagaaaatatgggtgaggttttgtttactcaggttttgtttttgttttcccctttacttccctttcattgttattgacgtctataagtatccattggcatgtgacccagatcgagccttattttcctgtttccaaagcatatgattaatttctaacgtactacattacttacttgtttattatgtttattgtttgcttcccctcctctgcccattaacttaagcatcagaagatcaaaaggtttttgtctattttgtccacttttatagcccaagcacttggaaaaatttctgatgtaaagcaggtgttgaataactttgttgactgaataatagtgcaggacatttttgttttgttttgttttgttttgagacagagtctcgctctgtcgcctaggctggactggagtggagagcagtgatgcaatctcggcccactgcacctccacctcctggtttcttttcttttctcttttatttatttattttttttgagacggggtctcgctctatcacccaggctgaagtgcagtggcatgatctctgctcactgcaacctccacctcccaggttcaaatgatttccctgcctcagcttcccgagtagctgggattacaggcatgcaccaccacactcagctaatttttgtgtttttagtagagacggggtttcaccatgttggccaggctggtctcgaactcctgacctcaggtgatccacccaccccggcctcccaaagtgctaggattacaggcatgagacaccgcacgaggcccacctcgtggtttcaagcgattctcccacttcagcctcccaactagctgggattacaggtgtgtgccaccacacccgtctaatttttgtatttttagtagagacagggtttcaccacattgcgcagggtggtcttggactcctgagctcaggcaatccaaatccacctgcctcagcctcccaaagtgctgggattacaggcgtgagccactgtgcccagccagcgtatttattttttaagagcaatattaggttcataaaaaaaagacgaatggaaggtgcagatatttcccatgtatctgctgcccacacatacacatagcctcccccactatcaaaatcctgcaccagagtgatacatttattacaactgatgaacctacatggacatctcctgtcacccatagtttatagtaggttcactcttggtgctgtacattctatgggttttgacaaatgtacaaggcatgtgtccaccactacaatatcatatcgaatggtttcactgccctaaaatattctgtgccaccatattcatcctacccttccctttaacctcagccactgctgatctttttactgcctccctagttttgcctttcctacaatgtcatacacttgaaattgtgtggtatgtagccttttcagactggcttctttcacttagaaatatgcattttaagtttccttcatgttgtttcatggtttgatagctcatttcttttcagtgctgaataatattccattgtctgaatgtactactttatgtatccaatgaattataattttagaacaaaaagtaaggtaagaggaacacaacttttttttgttgttttttgtttgtgttttttttttttttttttgagacggagtctcactctgtcacccaggctggagtgcagtggcgtgatctcagctcactgcaagcgtcggctcttgggttcatgccattttcctgcctcagcctcctgagtagctgggactacaggtgcctgccaccatgcctggctaatttttttgtatttttagtagagatggggtttcaccgtgttagccaggatggtctcgatcttctgaccctgtgatctgccagccttagcttcccaaagtgctgggattacaggcatgagccaccgtacccggccagaggaactcaacttctaatgtaacccgtccccaacccccaggccacggaccattacagtggtctgttagcaaccaggccgcacagtaggagtggatgagtaagtgaagcttcatttgtatttacagctgctccccattgctcacataaccacccgagctctgcctcctgtaagatcagtggcagcattagattctcacaggagcccgaaccctattgtgaactacacatgcgagggatctaggtagcacactccttatgagaatctaatgcctgaagatctgtcactatctctcatcgcccccagtgggaccatctagttgcgggaaacaagctcagggctccgctgattctatgttatgctgagttgtataattatttcattatatgttataatgaaaaaataataaagtgcacaataaatgcaacgcacttgaaccacgccaaaaccatccgcccacaccccatccgtggaaaaattgtcttccacaaaactggtccctggtgccaaaaagtttggggactgctcttctaaagggataaaacagttgccctgagtggactttttgaagatgtaaagcaagggctggggagatgtcctgagcaccgtgggataatggcctttggatggaaactgagttctgtcgttcattcagctgatgtttaagggcgccctccctgggcaggcagggtgctggttcttgagggtgtggacacccagagccagtccctgcgctctcacagttttccctctggctgcaagcgctggggtgtggccctagctggtccgttgggctctgcaggagtctaagctgggctcgggatagccggacagaccccaggccaggggaaagctcactcgtggctgtcgcatctctccctccaagcaggtcgaagaagggggcaaagcagacaccctgagctccaaactgcaggctggggatgaggttgtgcacatcaatgaggtgactctgagcagctccagaaaggaggcagtttccctggtgaaaggatcctacaagaccctcaggctggtagtgcgcaggtaggtggcagacccccaccctgtccctcctaccacctcaccccacctctctccctaccctaccccacctctgggaaaagagctcggggttggtagcttggctttaaacctccatgtatggatcctgcctttttttcttttttctttcctatcttgtgggatgtggggaggaagtggggtgaagacatttcagacactgctgtctttcagaacactcatttcccagcaggtactggtttgtcagggatagacctcactggactacctaaattttgggacctgatgaaaagtgacactcatcccagatgcggtcagagctctaataagctttttgtctggtgggactagagaaagaaattggcttggagctttcagtggcattttgggaaccacacctgcatcacagggttcttcaaaacaggcaaattctctcattggttgttttgttttctggtctcaatagtggtgattcctctgttgggaaagtgttgggttgtgtttgattttaatgccttagcatcagaagctttgtactcccgggaaccaacccttcgtggaggaaattatttatggaaaggggatgggaattgaattatttttttgatctctattagtaagcactgcttgagacattttacacatcttagctcatttaatctgcacatgaaccccatgagatagctaatcactatccccattttacaggcaagagattaaataggttactggaggtagccaagctgataagttgaaaagccagaatagaatccagattgcctgattctatttcatgccacttgagcatcattatcttgacctgctaagcgctaggcccaaatattttgcatatttgaatatttcttccttagatttcagctgcctcacatagcagctaatgttacagtatttaagaatgttctagttggctgagacttcaggagtcatcaatgaagccccaccattttcaggctgtagaaagtaagctggtcttccatcatgccacagatggcctcttaaagacctgcattaattcatttctcaaatgtttcctaagtgagcccatgctcaggggaacagcagctcctcccagccacaaaaaacacagcgatgactgtggtcccactgtgtctccaggctctagtgactctccctagtgtgctgggctgtgtctggtctgtctacagggccatcaaccagcaattgcttctctggtggtcagtgatgcagagtggctcaaagcataggcaccggattcagacagacccgggttcaaattccagggctgtcacctgttagctgtgtgagcttggccaaattacttaacctcactgaaaattcaatatcctcatctttaaatgaggatttaaatatatgtatttatgccaaaatatggcaacaatctaagtatccatggagggacaaaccaaagaaaatgtggtgtatatatgtatatgtttatgtatacacacacacacacacacacacacacacacacacacgaggaatattatccagccataaaaaaagaaggaaatcttgccatttgcagcaatgtagatgaacctggaggacattttgttaagtgaaagaagccagtcacagaaccgtaaaaactgtatcttctcacttatacatggtgtataaaaaagtcaaactcacagaaacagagagtagaatggtgtttgccagggactggggcacaggggaaatggggagatgttggtcaaggggtacaaacttttagttataagatgaataagttctggggacctaaggtaaaacatggtgactacagttagtaatactgtattgtttacttaaaatttgctatgagaatagatcttaagtgtcctcactatacacacacacaggtaactgtgtgttgattaatttgatttttgattgtggtaatcatgacacagtgtgtacatatatcaaatcatcacattgtacactttgaatatatgcaatttttggcaattatacttgggcaatccaacatactttacaaagtgattggaaagattagatgaaacactctgaggtaacaagagatgctgctgctattatttctattattattggccaactctaggcataggctcattccttgcagatccagatttcagtaaagtaagcagtcatctcaaacatggggctgatgtttcaaacagatgggtagacaagctcagaaccatggggccattccttgtgtccagagagtgctgaaggttttgaactcaccttggcattggaacccaggagcccagtttggaaacactgggcattgatctgttgggtactaatggcagaatccacactcctgatgtgtttcaacatgactgtggtgatagattggcctctggaaagggctgctctgtttcctgctatgaagaataatcatggtggcttctggtaggccttctaatagatggtgatataagatttgaattacttcttctagtagaacctttggaaacagacagatatggggttgaaatctggtctggttatttgcaaattgtgtgactttgggctctctaagccccagtttcctcatttgtgaaatggaaataatcattcttaccttgaaagggcattagtgaagtaagtgtaagtacacagtggatatgcaatatttgattattattattctggattaggctagagagatgtgacacatgctaatatggagaagtattgccataataccatatatgctggttccctggttatctggaggccccccctttcattctcttagtgagtttacaaccatttaagggctagtacccagcttacaggtccagaattggtcatgactgtctcagaccttgtggaatttaggagtgttaattcacagtatccaaatcacaagaaactgaaggatataaaccagaatgctactacactgactcattttggaaaagacaactataagtgaaaagtatgccatatggaccaaaaaccagtatatagtactttatccctacaagaaaactaaatgggaagtctaattatggtcaggagtttgcatagtgatttccaactccaagtgaagagaatagttctgtaggcaccagtatttgctaggatccactctgatggccagatggtccatcttcctaataggggcttggctgccaggcggccagagattcacatccagaagcaagggccctttcccctctgggccccagggaatcatgctgccaacgttctcctctccattttcattctcgtcaacaccaaatcctcttcctgattgacacattctttctttacgtatgctaatgcaatcgataaggttactgagcagttcttgcactttctgcttctggtgtgggaaacattttgtccctaagatgccttttgaatatgtcttatctcatctattatgtgttgatttttatagttgaactttcaaaggaaaaggaggctgcctttacatctgacacatgcttatagatggggattatcaacacgcctccagagacatggatggacattcctcccctaccttgcagagatccgggtagaagcctctttgcgctggattaatctggctttgtatttcgtagtgccgtcactttcctgagaagtcttacctttataccttggcacacgtcatcgtcctgagattctgtttcctttgatttattgatgccagagtgactaaggacatttcatttattaactttctttttttctatgtgatctctatactttaaaaaagactggggtgtcttcctggaaacataataggaaggaatgtctgtttcatgaataaatcatttgtgtagtcaaaatgtatattttggcagccatgtacctgcctctttttctcttaaagttattttggctgggcgagggcggcacctcatgtcaggctttcacatccatcataaaaatgccaagaacacagagcagggtaatagtgtttatataagttttgggattgtcttacccagtgaccaaaaacaataaaaagtagaaacaccttcttaaaaggctacagtgacaagaaaaatgcaaagcctcaagtaagttgtgggtcaaagactttcaaagatctgctgacccataaagaaggcagagtttagccctctctgggaggagggcgtgaaggaggcgctgtggacgctgcaacaacagagcatgtgtctgctgcttgatacacgaagagtgaaggttaacagctagtagtggataaatggagaagaaatgataaaataataagtgggtcagagaaaaaacattcccaaaggaaaataaacagctcccagttgcagaaaacccttgtggaatgcaaggacagtgcaaaggatgttaattaggaaagcagacatggacacgaatgagaatcatactccaaatcctccctgaaatcaacagagactttatctggtagatacgtgtaaaatagttgtccagggatcgggtaacctttaaaatggaaactgacaaaggaaagggtcttcaggtttaatttatcatccctgagggtaatggaagttgcgtttagtataaggaatgctcactgctatttgtagataatctaaaacttgaatttaaaaaataggaagctatatttgacctccagaacagattgctggggttaattgctgtgtattcatataaatacatatttttaccctgagttcagactcagactcctatcctgaattggattatcagaatggccttagaatcaatgaatccttaatcccaattctgatcttttctccattttccttggcaaatctaaccttccaaccttctgcattaaggtgctatttattttgtttatttacttattaatccttcattaatcaaaagaaagctggaggtgctatttttgccaaatactatcctactcctaaatttgttgtaagtgaattttttgtgtttttacttgtagttggcaaagaaaaacttgagtatatttcatttcaaatatttcgtacttttttataatgctatgcaagccaggcaaaagtcagagaggatacctgagatagcggtgtccagcactaccagatttgagactgcctgggtttgaagtctgatggcataggcactagctttgtgaccttgggcaagtaatttaatctgtctgatttttgcctcacaaaattgttgtgaggattaaataagaatcatgtgggtatggtatttagtacagttattaaatcatgaatctactgaaaacaagttgcatatttgttaagtaaattatctctttgacaagttccaccttaatctctagaacacagcatatgaagtcctagttaatgggaagactttggtggggaaattatctttctgggcatcaaagagagcagagggtagggaaaattgagccccttttcaaaatggaatcttcctcccaaagctttccatcacctctgcaagtttgatgtaacctttccccttcccatcaatttattctatgagttgatgtgttggaaggaaacaattcttttttatttggctgaatatacgtgtttagtagtactagtagtagtagtatcagtggtagatcacattttgctgggaaaagagagattgaggagaaagcagcattgaaaaagtaaaaaacaataaacatctgcctaaaatatgtatatgccaggctatatgacttgcccatgtagaggtggctagcgtgagaatctaggctagagtgagaatctaggtcttaagactttcagcccttgagtctctgcctggaggtagaaatgagggaaatgcatccaaaaataggtaaggacttgtccaaggccacatactagtggccaaaataagagtctagttcttcgaggatgtaagtcttagggacttttggcccctcaagcagtgaaatcatgaactagtgctttctattccactgcctcctccttttagaaatatctgtgatgctaaaaaaaaaaaaaaaaaaaaagagagagagacaaaagacaaggccgggcatggtggctcacgtctgtaatcccagcactttggaaggcaaaggcaggcaggtcacctgaggtcaggagttcgagaccagcctggctaacatggtgaaaccccgtttctattaaaaatacaaaaaattgtccaggagaggtggcgtgcccctgtaatcccagctactcgggaggctgaagcagaagaatcgcttgaacctgggaggcggaggttacggtgagccaagatcccgccattgcactccagcttgggcaacaagagcgaaactctgtctcaaaaaacaaaacaaaaaaaaccctcaaaacaataaaaaaacaaagaagcttatgtttgattcatctaagaaaacattttgaatgaagaggtgattccccattgaccttgaacttcctttgggaaggaaatgcaccggactactttggatgcccagcagacttgagtctctgcagcagcctctggaaatgaaactctgggctgcattagtggctgcttcctccctcctaacaaaaatggtgatgaaattaagttcaccaagacccttgggcccacactcccccgaattcaccgtcccatgtttctgagggttaacagaatagtttctttttataaactagtgagatgacattattagaatggaatgggatggttggctgacacacttgctacctcagtgtcagatttctgtgaccttatatttctagattgaattgcaagactgtaactcacccaggatttgcaagtcaatgatcttaaaagaaatactttgtaatgaacttttttaagtcctctgaaaggatacaaaattaactctattagctattaataaaaagggttgtgcaaatcagtgccttttccagctcatggttacagtttataaaagaaaataatttcttggaatattttcactaccacctcctcacttccttcacactgttttgccacctctccaccccctcacctgcctgactctatttcctgaaaaagcatctacattcttaaagcagtttgagattaaccacctgatgtctctttctgactcttttaaagcagtttaaagaagcaatttattaaaagctttaaaagcaaatggaacagaactccctatttttaaggcaataaagttgacaggaagggttgaaacttttctagaacataaaaagcatatttttttcttataaattgacaatctgcaagccagattgtgtagcacgaaggtgccaattctcagatatgaaattgcaaacagcatgaggaagacattatatcatctggattccagtctcagttctgctgtggtctggccatcataccacggtgctactcaatctctctaagactaaatttcttcttaaaatggaggagaacagttccatactgagttgctataaggatgaaataagatagtatatataaaatgtttcatcatagtaaaatattaatctttatttcataaggagcttctattgtacagtctcatgaaaagttacctgaccacattctctgatgattgctctatttaatggcactgatttgactcatttttgtaaatgagaacacataggttttaaagcttctgattataacctttctgctaagaggaaatgtggctttaaaggacagtaccaactaggcccaagttcagaatgggattttgtaaaaaaggccatattctctggcgaacgtaagttgaaagagttctaactttgaaccatgttgaagctcattggtggaaggttgagctccaggagaggaagctcggattgcaggaaggggctctctacgcaagtgtatttgcaccatctggtgtttttttgttccaaggactggtcaggttatataggcacatgtgacccaggctgagcaatttgaaaacataatgttctttagacagcacaatatgctgcctctgggaaagttatgacatcaaaagataactatcaagtgggcaggcagtgggaggtgaggacaaacagaaaaggtgcagtgacctttttataggcaattgcaaaactggtcttgaagctcaaggaactcacctctgtgcataaaagtgtggcttcctctacctctcctggacacagaagacaaatgagaaatatttctgtgccatggtaagttccaagaactgactttcaagacacaaaaaaaggcccgatgctgtgctctgtggttaactcctgtatgaaggggcaggaaggcagtgtgtccccaccacgtgccacaggaggaaagcacaggagctgaagtggcagccagcatggcaggcagtaccactctatggttctgtgttaggagcgtctcgtgtctgaaatgttacctctcacctccacatgtctcctgaagagctgtgaccaccctcccatgccccgctctgctctcccttcattacttcactcatcctggtcatctgctctttgaagttcttaatttgggcaaagggctggcagatgcctgggacatgagtacaaatcccaaactgcacttccgtttgcacccaggatgagacttccctagaggggagatcagtataactgagaactgtggtaacttacccttctaaacattttttccacttgagcaagtggttgagaggagaggaaggaggcagctgcagtggcctctgacccccagaaacttttccaagaggcctggcatcatggaaatttgctcagtatgctttgaggaggtatttcaatcctgctgggaccattctcagagcagttttcggcttctttggacttctaggcttgaatgtcactgtatagaagtatagtattttatttcctaaccagttgttccttcccatggaaaattcatgtaacacattattaggtttcctgagaggtatgcaataagactcccttactgtaatgaggaaggggacatctttttcccccgtagcacataatgataactgctatttttattcaatgggttacatatgcttactggctatgcactaaacactagcttcatacaaaggaatgttctattgttcctagtgaaggaggtttgatgataaaagaccacatttcattcttgggctagcacagctttacttcagacaaatgtattccagacaggagccaaccttctataccattaaagaattaatgaatgcaccattaaagaatggcactcaaggctgggtgcggtggctcatgcctgtaatcccagcactttgggaggctgaggctggcagattatgaggtcaggagttcgagaccagcctggccaacatagtgaaaccccatctctactaaagatacaaaaaattagccgggtgtggtggtgggtgcctgtaatcccagctattagggaggctgaggcaggagaatcgcttgaacccaggaggcggaggttgcagtgagctgagattgcaccattgcactccagcctgggtgacagggcgagactccatttcaaaaaaaaaaaaaaaaaaaaaagaatggcactcaaatatctgtctgagcctttaggatatgaggtctgagttctgagatcaaataaaagttatggtggaatctttccccccagttttaaatttggatgcatcagctaggacaggtaagtttggatgagtcccatttagaagatgaaccaaatatttggaactctgaatacttgaatcaaaatggcttaaagctactccttcttaaattgggctacacattggaattaccaagggagttttaaaacagcaataacaacaacaaactaattcctggctcctacctccagaaattctaatttattttattttacttgttttttgagacaagatcttactctgttgcccaggctggagtgcagtggcatgaacacagccttgaccttctgggatcaagtgatcctcctacttcagcctccggagtagctgggactacaggtgcacaccaccacacccagataatttttttattttttgtagacagagtctcgctttgttgcccagactggtctcaaatgattcccaccttggacctcccagagtattgggattacaggcgtgaacctccaagtccagcctcagagagtctaatttaatagatgtgggggtgtagccctgtattggaaactttaaaagcgcctcaagaaaaaggctgggtgcagtaatccctataatcccagcactttggaaggccgaggcaggaggatcccttgagtccaggtctgcctccagaccagcctgggcaacattgcaagaccctgtctctacaaaaactagccgggcatggtggtgcgtgcctgtagtcccagctactcaagaggctgaggcagaaggactgcttgagccaggagattgaagctgcagtgagccatgatcgggccactgcactctagcctgggcgacagagcaaaaccctgtctcaaaaaaaaaaaaaaaaaaaaaatcaagaaaaaacaatggatggttcatctgtactgaaaatgtacagcctttttttcttgtcattcttccctaaacaatacaacagtgattcacgtagcatttacattatattaggtaggataagtaatccagagatgatttaaagtatacaggaggaagtgtataggttatatgcaaatatgacatcattttatacaagggacttaagaatccatggattttgatacctatgagggggtcctggaaccaatcccccatgaatgcagagctacaactgtattcatttatttcatcagcccccatgtttcaaaaaccacactttgtatacccttagcataaatcccccatttcttgagaatgaggggtagagaaatggtttccataaaggattgttaaataccaccccctccacatatccttaatggaaaatcagatcttcgaaggtcctggcaagctttgtcctgttctgtttttctgttttatttaatttaactgctctaagatcacaagtgtcccatgaaggtcctggagaagaatcttaaagtataggtttgtgggttactgagagcagtagtaggctcttagacttcattaggcaaagagaaacacctggttccatctgacttgagatgaactgtgggttctttttcctttgatcattgtttattaagatggctacctcaaatatgtattttttaccacctgtctcctcatggttctgttgctttgggcatcttcgcatgtggcagctctgaagagcctcattagtcgttggcaaaattatgtctctaagactagcgtctttgtgcttttgccagtagctaaaatgtctgtttaattgtattacctagtctagaggcccgtgccgctgtctgtagaccagctgccagattgcttagtacagtttgtcagtgcatttgaaaaacgcaatttttctactcccctcttattctgctgtcaaactctagtctgatgctgcgtttgcttagtgggtgggatgtgtaaaattatacatgtggggacagttgcttggttagtgtgtttattgtttacgtaggaaggttgctatgttgttttcatgaagactgtgattctaaggagcatttttaaaagattctttgggtgccaggcgcggttgctcatgcttgtaattccagcactttgggagaccgaggtgggtggatcatttgaggtcaggagttcgagaccagcctggccaacatggtgaaaccccgtctcagccgggtgcggtggctcatgcctgtaatcccagcacttcgggagtccaaggcgggtgaatcatgaggtcaggagatcaagaccatcctggctaacacgataaaaccctgtctctattaaaaatacaaaaaattagccgggcgtcgtggtgagcgcctgtagtcccagctacttaggaggctgaggcaggagaatggcgtgaacccggaaggcagaggttgcagtgagctgagatcgtgccactgcactccagcctgggcaacagagcgagactccatctcaaaaaaattaataaataactaaaaagattctttggaatgtttctttaaaggtgtctcttagggatgagccactattattttttgattgtaaataagtaggggcccacaagccctggacacctaaaacaatctttcatggaattttctcaggacacattttgtatgtccttcaccctcataacttaaagaagcgaacaattgaagagacccattgttttttactggtggttacatggtactgaacgttttttttttttaactaaattaaaaatctcctcaattatcccctctgacttgctccctcacttccttcaggtatttgctcaaatgtcagcatcccctgcagagtccattttacatcgcagtcccctttctcctgtatcctcacacccttctaatctttattttttacctgtctctctgtcacacatactagaatataagttcttcgatggcagggattttgttcggtgtggtatccgcagtgcttggaatggttcctggcacacaaatgtgctcactgaatattggtgagccagctccaagccaggctgcctgacattgcctctcagctttacaacatttactactgagggcccttggacaagttaattgccctgtgccatggtttcatgacttgtaaagtggggatagtaacagtttccccttcacgggtataataaattgctgtctaaatcttggctgtttttaattacatcatcaaatagcgttagttatttttcctgcattaagagctgctggacaggcagtctgcacttatcttcactatccttctattccctatggaatatggtcaatagtttcatcacttaactgaccacacttttctcctgtatcccccaccaaagaaggatcatattcgaagtttgttttcccctctgtgaaatgagatcgacctaatttcctcctgccttaatgcccctgtgtatcttcttagtaaggtagcctgtccccagcccttgttcgggagtgaggtccccaggagcctggcttcaggggtgcttcttgtagcaggacccacccttctctctgtcctcagcttcctcaagtctcactggaataggtactctttgcagtcaccttgttatttggaggtttggatttgtttctactactcccacctcctacccctcagggagcagtgctgtgcagcggttaggagcactggctttaaatctgatagaatttggtttacaaccctgcccgttctgtgagatcttggccagtgacttcacctctcacttttttatctgggaagtaaagacaaccatccacacttcatatggaggttgtagccataaagacaacctgtgtatagaaaaaaaactcagccttgggtttggcacactgttatcaatcatctcattcataagttcaaccatagttattgagcaggtgctggcaccagttctcagcatatatgtgctgaatggaggcatttctatttttcactaagtagttttccatactgttagctgttttatgagtaaaagaacagatccaaccgaggagggtttggggcttacgtttctcaccagtgaaagttaaactaaaattagaccgaaatccaatttgtcagggggggaaataaagcaatgggaaaaggtgacttgctaataacgatggatataaaactttagtacggggtggatgggtgagaggtcactggcaaggctcctctcctgacctccagaggggtcattttggagaaactgctgcctgctttatgaaggtcaaagcacccagaaatgaaaggacttagcctcaggtcacaggtctagtaaaccacagaatgaggaagagaagtcaggttttctagcaccagccaagcctgctctctcagggcatacataaaaatagaaaactccaaaagccagagctcctttttgccttaatcttatattttctttcttactggtggtaggaaatggataatttgggatgttcatgttttgttagatgattctcccttctctctctcacacatctttccagttttcctagttttccagttttcttcctatgacagttttttttttttcccctcaaagtgtggtctttagacaacttgcatcaaaacggctgtggtgtctatttaactcgcaaatcctttgtacctcttcctacataagactgtcttgagggaagcctgccttttaacagatgccaacacccactgaaacttgcagcctctagccctaagggagtggacatgctcttctctggctgggtgaggtcaaccccatgaatctttcctgcctcattggcccatgtaagagacaaaaggatgagatcagtgtccatttgagcaactccgtggttattcttcaaagtctctagcatcgtgcctttccttggccttgatatataggtaaagttcaaaattcaaattttctacttcaaataaagtttggggatggtttttatttctgtgaactccttcagaaacattttagaacacaacccaaatgctcagaaatgttaaaacacacacacacacacacacacacacacgcacaccagtacttctcagcctgccacctttccaagggcagagcaacctgcagcagtttctaaaaatagacctttctgctacaggtcactaagcaggaatggcctccatgtcactctgtttacagtttcacatctgacaccttcataacaactgtgctgacttgatgaggcatgaggaccaacatcagtctgtgggaactcctgagaaaatgcaacctggggctgtggctggtgtgcaatcggtggcatccccacaaaatccagccgtgtttggattcaaggccctttcaacctttgtttgccattcctcgtcacctttccatcactgtctcaaagtcaggggcagaggtcaaaaactccgagtcactccatgaggtagcaatgaatataaacatgagctcatgttcaggaatttaagactcaccgtgttttctttcgttttgtttaatctgtcttgcatttctcctctttgcaaacttgtgggtttacaatgcatcatctagctgcaaatttaattttaggctctttcaagaaaatgctcagaaaaggcgaacttatctttgctatattcaggacagccctgcaacagtgagggctgtgtaataattcatgcacattcccgtcccagtccctaagtgtgcagactacgtgggtggtattagaattaaaatttcttgggattaacattctaaaattaagaaatggggtcaaagaatgggggcacttgacactaaatgtacatgaggtgattggactggattactgagcattcacagtcataggattcctagtaagttctgaagaagtggaccaattgttatcagtttaggatcctacttacaggaatcatttttgatttgcaaacttagcctgctatctttaaataaataattttagtaagctctcaaaatgttagctttgggtgggtgtctaagcattttcattctttgatttatttctcacaacaccagtaatagggattattactactctattttacagacgaggagatagacttgcaagagggcagtcttatcaaggggatacatgtgttaagtgtgaatttaaactccagtctatctgatacaaaagcccaagcttttacatcagtaaaaactagttcagttgagctggttttcagtgattgctgaaatccctgaaccaatatgggttcttcagcctctgggagaagaggagttgggcttggccaatgcttttatttgctttgctttaaagaaagcacacactgggcccttttgttttcccagcagtgttgattcacgttcactaaataaattagccttcccgtgttgtctcactcatttgacattagcaagtttacatgccaataaaaatagaaatgggagaaacaatactgcaagaagagagaagtggcagaggcgttagagtgcaccaagacatgaacacaagctcatcattttctacactcctttcaaaacaaaacaaagcaaaaccccacagcttgattccaatcacagtttgttctgtgattttatgtggttgaaatgcctgattaatactgaaatgttgtaacattcattattttgtaagagaatagttgagacttccaataagattttatcatttctcttccaaatagtggaagcctgataaatgatgttaggattctgtactagtcttactagtacttattcatagatctagaagtctctgtgtccattgtgagatgggctgtacgtgggtcaaatacagcttctgaagaagttgagatttgtctttgtgctctgctattaacagcatcctaatgaagcactcaagctactcccatcttctctctgcttcctccatactgcgccccccagcccaatctccctaaaatctttccttcctgagaattgttcctccatatctgcctctttcctggatcctcatccaaacttgcctttgcatttcttactccctcagagccttgctaggagatgatttgctaatctttgacatggctaagaatagtaaatgtcctttgagaacaatacaatcttgcactaacatacaacgggaataataaagttactattcatattttaaagggcaattttgcaggttgtcaacatcttaccctaaaggagtgagttcccaatggtgtaatctcagtgacaaactgtataccgtgataggtgacaggaccttcaggtcatgggcagaaagtgatcttaataaaggctgaccttggccactgcagcctgcatgttctggggcatcctgaggtctccctgtgtgactgacacttcccctgaggactattcccagtgcagtcagtaggaaaccttagtggtcaatgatggtgggccagggaggtgagggacagaggatgtgtcagatatcctaatagtatatacagtttaaagactcatttcataattttgggagttgttttctagggatattgtgatcgttcaaatgtaaatatctgcatcttgaatatactggaaaaaagtgattggcatgttttaggggcagctctagcagtataacagtgtacgggtttgcccctttatggtttgtgggtaggaagagatttattctgaactagttttctctgctacccaactgcttatgaaatatgaacacaggctgggttcagtggctcaagcctgtaatcccagcgctttgggaggccaaagcaggtggatcacttgaggtcaggagttcgagaccagcctggtcaacacggttaaaccctgtctctactaaaaatacaaaagattagccaggtgtggtagcacacgcctgtagtcccagctgcttgggaggctgaggcaggagaattgcttgaacccaagaggagaggttgcagtgagctgagattgcaccactgcactccagcctgggtgacagagctagacactgtctcaaaaaaaaaataaaaaagaaaaaagaaagaaagaaatatgaacacaagcttgaaactcaataaaattgagatttagatctgtcacttgccctcaacaggcacaacaaggtaaggtggccagatttaacaattaaaaatacagatgtcctattaaatttgaatttctgataatcattgaatttattttagtcaaagtaggtacccaattttatctaccaaacctagtcacatgacaatttagatgtatagaaaaaaatgtaggttccttgtcttccttacaaacccacttctgctggttggcaataataataataataataataataataataataataataataataatttttattcctggccaagttaaaagctcacctggtccaatcaatttgaatagtcccttaaggggctcagtctgaaataaaatcctcccttgctcagatgtcatcttttttctccactgcccagctgtcttgctaaacagtgtctggggatttggagaagtggtgagcgcaggtctttggcaccatctcccctggtcccttggctctgtccatagccttcccagccactgctggcctccaacgctgaatcctgcagctggtaaatccatggtcagccatggcctgggcaatgcccctgggattgctggcaaccccacacttacagattcagtctctgctcagctccccttagcttcagacaacttagcatctgccaaactctcatcccagcaactcctgacccagggcccatcctaggatcatctcaccccaccatagttgcctccttgcaagtctgctggttgccgtctgatgtctgagattcttccttctgtctggacctctagagacctcgaaattgagccaggccagacctactccagtgaccttctcctagggtctcaaatggtgcagtggagccagggttccctgagccctttgacattctcctcacttagctcacacactttccctctcctccctgaggctagaagagaaatcagaacttggtcctcacagcttgacttgccaccatcttttccctcatttccacaagttgctgggatcttgagggctgggttttctcactatttctcactcttctctgtgcttccctacttctataacttcaagcttcttgtcttagttgggaggggtatcttctttgcacgatgggaaaattttggcaattagaatcctctaggcctcaccctggataggttacaatggttgtcaaaagtgtgatcatgcccaggaacttctggaaaatacaaattcccaggccctgctctaagcctaatgaattgggaactctggagtttgagcctagcaatctgatttaccaagtcttccccatgattctgatgcaccctaaagaaccatggcattaaatatttcagcaaattctctctctccctctctaccaacgcctttcttaccatttttcatgcctaaactcttattagacagaccggatactccctcttaatctaattgattgattagctacataaactcaaatcattttgtgattaaaaaaagaaatgtatagccttaaaagcaaaggaaattctgatatatgctacaacatggatgaaccctaaggacattatgctaagtgaaataagccagtcacaaaaagacaaatactgtaaatgattccacttgtataaggtacccagggtagtcaaattcatacacaaaaaatgtagaatggcagttgccacaggttgggggaggggagattagggagttttgttgagtaggtacagagtttcagttctgcgagatgaaaagagttctggacattggatctacaaaaatgggaatatacttaatgccactgaagtgcacccttaaaaaacgggtataccagcaaaccaaattcaatagtacaccaacaagatcattcatcacaaccaagcgggatttatctctgggatgcaaggatggctcaacatatataaatcaatcaatactatatatcttctcaatagaatgaagaacaaaaccagatgatcatttcaagtgaagctgaaaaagcatttgatcctttcatgataaacatcccttcatgataaaagtccttcaaaaaactgggtataggagaaacatacttcaacataataaaagccatagatgacagacccacaactagtatcacactgaatgggaaaaaaattgaaagcctttcctctaagatctgaagcacaacaaggctacccactttcactactggtattcaacatagtactggaagtcctagctagagcaattagacaagagaaagaaaaggcatccaaactgaaaaggaagaaagcaaattatttttatttgcagataagatgatcttatatttggaaaaacctaaagactccaccaaaaaaactagcagaattgataaacaaattcagtcaagtcacaggatacaaaatcaacataccaaaatcagcagcatttctattaggttggtgcaaaagtgattgcagtgtttgccaataaaagtaatgacaaaaactgcagttacttttgcaccagcccaatatatgccaacagtgaacaatctgaacaagaaatttaaaaagtaatcccatttacaatagccacaaataaaattaaatacccaggaattaaccaaataagtgaaagatctctataataaaaactattaatataatacactgatgaaaggagttgaagaagatacaaaaaatggaaagatattccatgttcacaaattgcaagaatcaatattgttaaacttctcaaaagaagacatataaatggcaaacagatatatgaaaatgtgctcaacatcattgattattagagaaacgcaaatctaaactacaatgagatattatatcatcccacccccgttaaaatggcttatatccaaaagacaggcagtaacaaatcctagtgaggatgtggagaaaagggaaccctcgtacagtgttggtaggaatgcaaattagtacaaccactacggagaacagttcaaggtttctcaaaaacctaaaaagaaagctaccatacgatccagcaatcccactatggggtatataccccaaagaaaggaaatcagtacctctaagaggtatctggactcctgtgtttgttgcaacattctttacaatagctaagatttggaagcaacttaagtgtccatcaacagatgaatggataaagaaaatgtggtacttacacacaatggaatattattcagccatttaaaaaaatgagatcctgccatttgcaacaacatagatcaaactggagatcactatgttaagtgaattgagccaggcacagaaagacaaactttgcatattctcacttgtttgtgggatctaaaaatcaaaacaatggaactcatggacacagagagtagaaggatggttacagaggctgggaagggtagtaggaggctggtggggaggtagggatggttaatgcatacaaaaaggtaggatgactaatacctactctttgatagcacaacaaggtgactataatccataataatgtaattgtacatttaaaaataactaaaatcgtgtagttgggtagtttgtaacacaaaagataatggcttgaggagatggataccccattcttcatgatgtgattattatgtgttgcatgcctgtatcaaaacatctcacgtaccccataaatgtatacacctactttataaccacaaaaattaaaaattaaaatgttaaaataaaaaatgggtaagatggtaaattttgttataaatatttttaatttttaaattaaatttttaaaaataaaaataaaggactttggtgattaaagcaaaaataaaaactgggttaaaaacagtttaagcaataggtattgatttggtgaatggtgacatggccaactcagctgattattcattgaacgtaatcctggaggttagggttcagaactgaatactggaacaaatgctcctggtaaacatgagtatttcaccaaaccttaattgaatttctgatctacctaaagtataagaaggagctggtcaaatagatctgactctagcgttccaaaagggtaatcggtgtcagtgtgtctgttgagataaaagataatctatacttgaaattttcgcatatcacaggctaaaaagccctctgtgtaaattaattcctagtggtctatatctttctacattaaaaatatgggcaaatcaaatttccccatccaccaaagggacgaggtgctggggaaggtctgattgtttactctttactgtgtattgttgtcagcagtacattggttaactaggaattattctaagtcccttcattgccctgttcttccaatcatttggcatcaggtgaatggttccagcctccctagaggcagcaataaaggacagggactggtattggaagatggtggggctgtagaccaatacctctgcctcctgtattatttgtctacccaataaaataatattctttaatataacaattcacgtttatcaatcttgttaaaggatgaattaaagaatctttagaaaaatgctccagtctaggtaaaatctgaacttattatgcgtaacacaggttcaagacaagtcccctataactccttcacaatccagttgctaacatttagcccctcttataagaaattctgcagccaccactgttctaactccatttccatgctgcatacattttctgagagggagaagaatctttaaacatcaaattctgccatctgtctcaaaactatattcatataagacaatgtttccataagccccaggaaattggtttaggtaaataaaggtagataatatctatgttaataaaagatagtgatatattttctctctcttcttcttactgtgttcattgtttttttttaagtacctaggtaatgtcatcttttaataacccacacctccaccaatccttataatgtaaatcattcagaatttagattctaaattaaataaggtttattatgctcctggttaagaaaagaaggttatcatagttttgtggaagagctaagaaaacacacccctaattttatggggaggctatggagtgcaatggaaaagtacttgaactttggagtagccctgactttgaatctggacttttcacttattggctgtgtgaatctagctgcataacctattacaaactcagtttcctttagctatacggttggaggaaactttatctaaatttgtatctcagggggtttttgtggtacttaaatgagatcctctatgcagaagcagggtgacaagcaagtacttggcatatggtaaccgcacaggagatggtagttatcagaaagaagaggtgtgtgaaagcagtaatcaccagagctcttggctaactttgtgaactgcatggggttgttgagtttaccatcattctttttggttgtaccttacttatttgaacacagttttatttctttcagacttgatgcaactatatctgttatcagtttctcatggctaagatgtgaacgagacaacaataggcaaagctcatttatgatgtagacccaaggtgggctggaaagtctggaataagctggaaaggtcttgatggaaccttttgtgggtgttagaaatgttctatatcatttttaccctttacatagattagtacactttatccattctgtgtatgttacactttaataaacatttttaaatgatttgataaggatcacaagacccacccataccaaatccactattaaagcaagttgattttatttttaataagcctcactgaatttaataaagttttttgtgcgaatttaaaaatgacatctggctgggcatggcggctcatgcctgtaatcccagcaatctgggagtttgagaccagccctggcaacataatgagaccctgactttacaaaaaattttaaaaaatttaaaaaaaaaattagctgggtgtggtggtgcttgcctatggtcccagctactcaggaagttgaggtgggaggatcgcttgagcccgggaggtcaaggatgcatgagtcgaggttgtgccactgctctccagcctgggcgacagagtgtctcaaaaaataaataaacaggctgggcgtggtggctcacgcctgtaatcccagcactttgggaggccaaggcgggcagatcacgaggtcaagaaatcgagaccatcctggctaacacggtgaaaccctgtctctactaaaaatgcaaaacattagctgggcgtggtggcaggcgcctgtagtcccagctactcgggaggctgaggcaggagaatggtgtgaacccgggagactgagcttgcagtgagccgagatcgtgccactgcactccagcctgggcaacagagtgagactctgtctcaaaaataataataaacaaacaaacaaacaaacttacacaagtacttggtctacagatgtttgtttaatccacattaaaaatctggaagttttgcataatctggatttctggcttgtggagaagtcagacgatctggcagcagtgggctggagctgcatgcttccacgtctaatgaagcattccctctccagtttgccttggggccccactgtttcctgtgatcctacacctgttgctttgctcatttactccacctgcctggtctagtcagcatttgagtttgccagccttgtaacacaaacactggttggccagttatcttcttcatctccagccaactgacaaagttatcttttccactgaagaactggttgatgatttttaatcctaaatcggggaagagaatcgttgtgtcttactctttgatctctccagtccacggcaagcattcatgaaatgcttgttgagtgaatgaaaaaccccgcatcatgtgctgactgcttgtttgtacgtatctcctgtcacatttcttttcatggcacatgggtttgttagtcccactgtgattcaaaccgtccttttctaccatagcacaagatgccgggttaggaaagcgaaaggaaaaatgttctcttcactgtcagtttaaatcatgatttgaagcaggttttattataccaaattatcatcaggctaattgcttgacaacctctcttgttactgctggctggcgccattcaactgatcccctctgctgatatctggctgggagaggcgtggcatatcctcactaaggagaattctgctacctggaaaaatacccaaagctgctaagcatcatacatgccatctatgtcccattccgaagttgccgtaaatccaatatgtgcagtagtgtttaagagcatatgacttgaaatcaggttacctggcttcaaatcctattactaccacttgttttgtgaccttgggcaagttctttttttttttttttttttttttgagatggagtttcgctcttgttgtccaggctggagtgtaacggcgtgatcttggctcactgcagcttctgcctcagcctcccgagtagctgggaatacaggcatgcgccaccacacctggctaattttgtatttttagtagagacggggtttctccatgttggtcaggctggtctcgaacacctgacctcaggtgatctgccggcctcggcctcccaaagtgctgggattacaggcgtgagccactgtaccccgccaactttgggcaagtttttaatctctctgtgcttgagattctccagctgggaaatggtgataataacagtacctccctagtggagtggttgagagagttaaaacaaaatatgtatttaatatcctgcctgatgcctagtaaacactctactaagtacatatgtaagtatataaacgtaactgatatgtgcttctacctttccaccttattctttttttttattatactttaagttttagggtacatgtgcacaacgtgccttatttattctttatattagctgtggaattgtcccagagattgaaatggatcattaataatgctagtttgtgttccacaatgatttttctccaagaggctttttttttcattcctaagaataaattgtgaacccaaatgtaactcttttacctgctattcttagcactaaatggtaacttggttttccctgtctgggatgttgggactttgaagggatgattgagttcaatgcctttaattgctaccttctggccagtaacattcttgtgaagaaataccttggtttccccaaagaattaaagaatgtggaaagagagaaaaaagaacagggggatatgattactttaggccagtagaaaagaagcaaaattaaattgaaaaaatgtgttgattctcatctgtaattccagtcattttcatttgtgtgcctttcgattgctgtatcataagtggtttatgtcctacagttattatactggacaggcattgtataataatactttggacttaactgacatcttttatgatactaagaagcctggagccattatctcatcaaaattgttaaagttacggtgtcatcagcctgggataaaaaatgattgcctgagtgtaaaatgagcattgggctcagctgctgtgtgtctgcttcccttacagcattttcaaggatctgactctttcagacatacttggagttcaacaaatacaatttcccaggaaattaaatgaaaatgggctataagggagaaactaagcttactgagtttctatctaggctcactgcccagttttctttcaacctgaaacctatatgtgggaatttgcagagttgggctaaactaatcgtgaaccccacgaagttcatttactgtctaacacatcatcatcatcttggacctggtctctaccctcaccattgagatttattctacaatcactcttccttctaaagatgcagtgtgacttccaaaagtgagatgtacaggacacctgttctacctgaatcttttgcatattttgtaaagtttatttattaagcacctaataaatgccagccattgctctaggtgtttggaactcagccatgataaaaatcaaaaacctctgtctcatggagctgacattcttgtgagcagaagcaataaataacaaacacaatacatatgtgaatgaaacagtgtgttagaagttggtgagtgctcttagaaaaccagaccaagagttcaagaggctgtttctagctcccccattcataaatttcctaagttcctcctgggagtttaaatggctatgccctacaggcatttaaacctaccttacacagaaaatcaatctaccttacaacacctagagaatagtttaactgttatggacagacccagaaattaaaaaaaaaaaatgagcaaagaaaccacagtcttcattattttgtgcagctttcccaccatagaccttcatctctaatcccaaacaagcacctcacaaggccatgtgcaaatcattaaggaaaaagaccagcggaaatctggtgttcagaaatcaaggctattcatcttggtctgcagttcatcaacagagtaacataaaactctcctgccctgggcttataaaatggcaattaggagaaaacaggatgtgcttgagtagatgagctactagctttgagagaaaaaaatgaaagcaccatattcaaacactcatctagtttattcctttttatcctctcttcaccacaaatattaggactaggaagacactgagtgatgttctagaccagaggcctcctccaaggatgaggaacagagccttagacaataagtaacgtgttcaaggtcacgtgctaatcagtggcagagccagaagggaaagcaatgtcccctcccttctggtccagtgtgcagcggggtccacagcactgcttccagattagatcatcattacttcttccaacaagaatggcctaaccctctgcaagtgattgccaaagaatctggacaggtagaaagtgagaagtcaagatgtttgtgagagcattccacatgaggaacagatgcgtttgtttttgatcacagctgagtctgaatgctctctagaactcagatgtagagaaaggaggaaatacaagatggggctgtgggcaggtcttacctgggctgggggagcagcgtggtgtggatggtcttccttctaaatgaggggagctggtgcacattccagtgtaaagaacatcctatgcaccagagttgtctgcactgacttaggacggcatcatctccagacttgaggacccctgagctcaccattcttctgtccatgagtggccacccaaccacccaagggtgaaaggtcgtgctctatgctctcacctcaggtcatgatgaaggtaggaagagcgaccatccagcccataccaccacaactgggtaacattagagctcttcctgtagaccaagcactatgctaagtgctttttcatagcatcaccttcagtcctcacatcagataggtacccatttcagaggagagaaaactgacgcttggaaaagctgaataatttgcctgcaatcacaaagctggtgaatgcaaagcctttatctcagagggtggtggttcagaacatgggctctgtggtcagattgcttaggtgtgcattccagatctgctgcttgctggctgtaaaatgttcaacaagttacttctcgaagcctcagtttccacatctgtaaagttggagtaataattataatatttaccttatagaattgtggtgatgattagagaatgtaacatggtaactaccgacacatagtaactactaactatgggtcaactgtaggttggaaccacatgaaatttctattgtagtggaccaaaaattatcaaatattggcaatttcatatggttcaatctagtattactaaaaggcatccattctttgtaaatatcaatgctttccttattcatctcataatttgtgaaaggacaggttatttaattgcttttaacttttccttgttttagtttccctaaagagtgacatagaggctgggtacggcggctcacgcctataatcccagcactttgggaggctgaggcgggcagatcacctgaggtcaggagttcaaaaccagtctggccaacacggtgaaaccccatctctactaaaaaaaaataaaaaattagccaggcgtggtggcacatgcctgtaatcccagctacttgggaggctgaggcaggagaatctcttgtatccgggaggcagaggttgcagtgagctgagattgcaccactgcactccagcctggcgacagagcaagactgcatctcaaagaaaaaaaaaaaaaagagtcacatagatttcttttactgtaacaacataacatccatgaggactgtgtatgcaatatacacagttccctgagccaacacaacctgttgaggatgttgtcacagagaatctggagcagagtggatctgaagtgagcttaaattggacagagctggactatgaggaagtgactggtgacacaaatgagtccactcctggctcctttaaactactgtgaatgttctggtcttttcaggaatggcgttcccatactagccggctgattgtgataaacaaacgtcaaacatgaccattcgtcattccgcatagtggagatgagctctggtctgcagcaggaggttgttaaatttgacatattcaaaatgaattgcacggcctggctgctcttgaactctggcttgctgggagtagcctatgatggaaggaaattccactctgtggtggtgttttggggaggttgcatggtggggagaggaaaacataaagctgggataagaacagtgctttcctaagaaaaaaggaggctacttttgaacgaatgcatctatgatgccagatctagtgggaggcttctcttcttttgaaagatgattctgtgccccaccccattcctatcccacatttgcctcaatttcatttccttagatttcacattatagagatataaataactctggaattcaagtggaacattctagagagacagacattctagttaaaacaggaacaatctttcaataaaattagtatcacctttgaaatgcaatgatactttgaggatgcttcagactttgttggtgtttggaatgattactactgctggtagaaaataatgccactgtgaattcagaattctgtgtgtgtggggaggggggcatgctccctttctctcttctttctgtgcctaaaaataacctgcaaatcttgttcaaattcttttgcaaggaaatttataaattgtctgtgtattctataattattttcccatcatgatggctctaaggaaaatacatttacatacccataaactcagacactcttggagtcccattttctttctgtgtgtgctgttccttttctctttctctctctctttgtgtctatggttactgttaagctgacccctacagtctggggcaaataccaaacttgaatcaagcactacttatccatacagctgcgaaggattgcggtttcagggcctcagatgatagatttaagtaaagtctgtaactggatggagtttaggaaacctgttatgatttcatctacaaaggcgggctgcatcgcaccccactgtgctgaattttaagatgcgatgtggtgttgttgttttgtctttttttatgagcagcatctttattataaatgatctatttttatgtctgtggtgatttttataatactgaatttcattgttgagaacaatgactgtagaaagatctttctttattgttcctgtctcttctcccagtgtctggaagaaactgttgcttgcaaaaaacatagctaattaaaaattgaacttaattagctacaaagaagcccgactcgccagggctgggaggaagggcagataaagctgccgacgctgtgttcttctttaccttcgctttaatggtcttcacagcacgtcgtgtttatgagtcagaggaccctagagcgacacttgttggggacgggcaggacaccacagcacgacaggcagctcctgcaagtggcggcgggaatgcacgccggagtcggcgtgccagcgcggtggaaaccggttctcaggttctggccgagtggacttccccttacatcagcgggccagctcctgtcaggcaggcggccggcgattggccgggaggaggcagtcattcaaactgccttttgtgtttggctaatcagggcagcccaggttcccagcggaggtgcgtctgtggtgtcagacacctgtgtctcagctctgtcttcctcgggctggctcctgcggatccttcctgggccagaaccgtgcctctaggccacctcccccaagccaccaagcccccgcggtgggccagccttggcccagtgtcacgcaggacagaaatgaccaacagataactgaggacaatggacctgcctgggcatagacttccttaaggtaagtccattttaaaccaacgatttctcgatgacattatttctccgtcgatgttggcagaaatgccagcattgggaaggtaaactaaagagaggtagggaagttgttcaagttaggcctttgtgatgaaatcaccaaggttttgggctgtcagatatgctgacaaaataatataaaagaataaagaaacatgtacatggggaggagagagcttgacaaatgactctagtcctctcaggcaacgggcactttttcctatttgatgagaagctcaaatgataacagagtaaagtaacttttagttaaggccaacaaatatatatgctaacttgtataataagaccaagtcagcctgaacatcttggctccctccaatcatgcaacctcaggatttacagcctaattttaattataacttatttttaaagctatctttaactttcttatttgggatatgaaggcagcttttcttttttaggtttgttcgacatgggtgaatcaatgaattgcacttcaacagcaaaattggattgtattgattggttggctcactcttctcatcctttatgtttcagagaaggtcggattataaatgcaagcacctacatttaagcaacagttgagatgcttaagaacgtgcttctgtgtgattctgattaatccttaactatgctctgatttcattttacttgtaaatcaattgacacatacttcagggaccatcctgtcttttctctggggttgctgtcaccgtatttgtaacttgaggatttaataattgaagattgataaaaaagactggtggtttgggactagtgttttcaccctgtctgttttgttgtgataggaaggaaggtaattttcccttggatttaaatttttttcattgaaaacattctgaaaatgggtaaagttctctttataaatctaaagaggttctgagactacttttcccacctcattaatttcaaggatgtaaacaccttcatgaaaggaaggtgtttacccattctcaatgattctgttcaagtgataaacagcaatagggcaaacaggtcattcaaaatctgtgctaatcatcctcaagtgtgttttttcttccaatgattacagccagttggagttttccatttttttcagcagttagctaaagtgtctttataaaaacattttcctataataaaataacacattagtgacatttaatataaacataaaaattactgctttgatgaataaaagcaccagaaatggcattacccatcagatgaaatatgatcatcacacaagtctacagcaatcacttaaaaatatagtgtatatgcaagtgattttaaaatatggatccataggtaggtagacacaaagtgaatttataaatgttgaagttgttaaagagaaatgaacattggaaagctaaatagatattgaacatttttatatttcaaaaatctaccttcggttatgaattacaacctagagaatatataaatcaaaggtaatttcctgagttaagtgtaaatcattttttgtatggagagggataaataccctcatcttattccctaatcttagccctaatcattgtcttccataaaaaccccagtatcctaaaaaggtacagaaaggaagaggagagagctggttgaaaaacttcttaacaatacttaaaagtaaacaaagtcacaaaccccacgtttcatattaagagtgtagaaagcccttgttcaggtctgcagagtaccagggcactccaaatatgtaatttaacacattcattaataactatgataaatagatattttattccaagaacaatatcattagagagttagattggagggcaaggggattaagtatcttaagtttattgtttcccgagtgaccatttttaaaagcctccttccaggaactgtggaatgcctgccaggctccctgactgctgtctggtgagggtccctactggtgctgtggacagcacaatacacaatggggcacaagaaagccacgcagcctccccctcctagacacatgctgtgcacccccttggctctgcttggaaggttcagctctgcaaatggaaggttgcaaacatcagacaccttctttctgtttctgtctctctccccttcttctccccacagtgtccagccttggcccctgacttttcctggggttggggaggcctgtaggttcagaagctgagcagctgggtgaagacctcccttagctcaatgtgctctggccatagggagcagacaagcaagctgagtttgggtagccctagacacatggaaaaagaaacagcttcctcacctccacccctccatagatgacttcattaaaatgtcgctggttaatagggaaaaggtagcactccttgttaggccaaacccctaaaaggcatgttttttagaaaacaaaaaataaacaaaaaaaaaatccccagcagtcttaatgatcacattttggtgacgggtgggaaggtatactttcatacaaatggatgattttggaaggcatgaacctaagctgtctcacacaattttgcttcttagttggactgactggtttaaaaaatgaagcccaaatgatagccgcagagcggtatgggtggcatatcatctgatcccattgagataaaagctctcaacaaacttgtgtgaaccaaaactgatagaatgagtgatgttccacaagtgatcaagagactcctagctgggtgcggtggctgacgcctgtaatcccagcactttgggaggccaaggtgggcagatcacctgaggtcgggagtttgagaccagcctgaccaacatggagaaaccctgtctctactaaaaatacaaaattagccaggcttggtggcgcatgcctgtaatcccagctaatcgggaggctgaggcaggagaatcgcttgaacccagaaggcggaggttgcagtgagctgagattgtgctattgcactccagcctgggtgataagagtgaaactctgtctcataaaaaaaaaaaaaagaaaaaagactcctggcatcagtcactgaaggaggactttgcttctgcactggaagcctggctttaaagcaaaaactctggtgttggaatgtaaatgagccccaccctgggaagctatggctgctcagaaacacttggttttttccaagtaccaaagctccctagtaagcagtagagctaccagtagactctgcccactaaaacatgtgttccacattgcccatcagccctccaggggcgggggtcccagcaatcagcctctgaagggaatctccaagttcttcccttatctttactctcacagcagtggaggcacagtctcagtgacctgatacttatgcatttatttctcagttgtttattaatcgtggatcattagttcttccatctgaggtaggtcatatatcattatcctagtgtggaagagagagagaaaaagaatgaaatggaagaatttgtccaacactaccaagaagttagtgagaaattagaacctcaaataccatgcggttctccttccctttttgtctttctgtcaaaacggaaatcagggatccttaaacctttccctgagcagttctctctgggcactaaaatgcttcaggccaaaaatatgctggttctcttaactggatcactctgtgactgaaagagagagcattaaaacaatgaaatgaattgggtgtgtgctcacctgaacaactcaaaaccccagcgggttgctggtaaagttttcctgaagcctaaattgaggacagcaccctctctcctctggctttttcctagaaagacctgatcatttagtttataacaaatttcaaccctggccccttgaccagggaggccagttgcgggtgagccgtctgaaggtggctggcctgcattgcctccgaaggtatttcaggaatgttaatggtatgcctgagtggaggccgcagagctccgagctcaggcctgagaactgttcttgtggccatctgttgtggcccaggaagtctcatagcaacagcttctcaagaatggtgcttttttttttttttttaattaaaattaactcacacaaaaccaaaaaactgctccactgctcaagaagaatcaggacagcattcagattttttctacacagtgatgagtttttaaggaagaaaagcccccgcatcctacattcctgttctttaaatgagcaatttgtacttggtgttgaggtcttaattttttttttttctcccccggggtagaagtctttctttggaaaagaatggaggtgaaaacaagtttccaaggctgtggagaaaatagtcagcaaaaatatggttaggaaaaaagtggtcagtttttttgagattttcttggtatttgttgttcttagcgatcctgtcggcagctgcatttttccccctctgtaataatgtgagctttatatgcctggctatttagttagtgaaatgaacttcagacaaagacactaattttaccatgatgatgtatgccctccggtatgaatatcgaatctgtgcaacagctgacctcagaaaaataggtagggaaagtaataattatagtttcatattttttcattgatgagacattaagttagtcatttacaaaaactgaggtttttcctcaggatagaagatactgtaaaatgataaatacatgaagcctgggcaggcatgccagacagagacaaaagaattctattctgttccgcattgtaccccttaccaggctatttcaggaaggcacacggcctgtcagagcacagtgcctcatctgcaaatctgattcctgcattgttaaggaggttaaatataatcacctaaaaggaacttgggaaaagatccttgaatctgaatggcgtctataaagaagtattatacactgtcattcttgctgtggcacaaccctgggaaaacattttcatgagaacttttagatctccttcactttttagtttggcacacttccctcaagttttgtgacatgaaatttcccagaagagtcgcaaaatattccaagtgatttctgactattattacataattcctgaatatgcaacacacttggaatacttctttatattcttgattggtagtgtgtattgctacttatatattattcagatgtaatacattgcccttagtaatggcgccaacctctatttacgtgttatttagatctattacattgcccttagtaatggcgccaacctacccggaaagggatatgtacttcaagttttgtttctgaaacacaggttcctaatgacgtttttctttctataaagtcctgactcataccctctttgtgcatattgcctcccatataaaatataaccaccacatatttaggaagtgcctaccatgtatcagctgggtttctaggtaccgagtttggagctgtgaataaaagtagacaaaaattctggcacacagtctagtcaagtgacacaggtaacaagtcagataacacaaaaataagtcaattgtattataggctagaaaatgataactgctatggaaaatacataaagcagagaagtacatcatataatggcagagagcgtattgcaattttttagggggtggtggaaggacctgctaagaagatgatatttaaaagaaaacttgaaagaggggaaaaaatgagccttgaaggttacctagggagcattgctgacagagagaagagcatatgcaaaggccctggggcaaacgtgtttgggaaagagctgggaggccagtgtgggtggagcagaatgtggcggggcagagagacagtgggtcactgggaggcagttagcttttactctgaaaaaatcctaggagaacttgcttcacagagcagttgtgagcattaaatgaaataatttgtgtaaagccttctatagagtgcctagcacacagaaaatcttcggtacttgttagctgtcatccatttgcttattattaccactacatagtctaggatttaaggatggaatgatgtgagcacacagcacagagctttgttctgatcaaagttaattgtttcttatgagaattaaactcccaaccttggcctcttaaacattaaattctatcagctaagaaggttccaagtctatatcgtcacacgtacagagaaaaaaagcttgcttttaagaaattggccctgactaagctaaatcgttgtttccattttgaaagtaccaagtccatgctctctagggacaggtgtattttgagacatttgcttccaatttcagctacaaaagtcttattgaattccactgaattcgcatgatctcacaacgtactcatgtttgagttctgatatcaattcccttttctaggcagcaggattcgaggtagggaggagcatattgcagatataatgaaaataaggagtcaatgtgcttttcttctccccacagtccagaagcaagattaccttttgaggcacttcagtgaccctttcttaaaatgatcttcctggacacccctttgaatgtctagattatgctgatctcctttgaacctgagggacttgggtcataacttatgtcgagtgatgactagctcaggaaattagaacaagacagggaatccttttctccaagcatatgaagaccatcatttagagtcagggatattcttgctctagaaccaccataagtgatttgggagcaacaaaaggaattattgatgataactagagatgctgaatgaatgaaaagatctgtctaaaaatgtgcaccttcatcactggaaatgcttcaggagaggctgattaatcaatcaatagtcagaggggtttgagtttatccacacgacatactaaaagaagccctttggggttaagaaataacccctagaggatttggcatcctaccagagatcatgtaattaatgacccagaaaggtaccatgtttttacctcttcaacccaaagacagtaaagaacacagatgatataatttaatataaatctgaaagaatgataaaaccacccacgatgactggccctgttatttatttagttggtcaagttctaatattttggcttcacaagttccactatttttgatgacatgtgttgtatatttttagttgtaaatcagtaatctttatggcattcctctaattagtaagcaaagtaaactctttttaaaaatttgggtgagaacttgacttctaagatcccttccaaatttgtgcttctgcttcatccttccaagatctgcttattaaaaaccaaattcttcaggaaaagtcaccttagtttaggaattctgagagccagaagcaactgattgtagaagccctatttcacttaggggcagtggctagtggagtcattttcttgcagtgtcaccatggtcctggtgcccggaaccccagttcccaacaccgatgatgctgtgttcctgtttgcagtttccaatattgtcacatcgctactgctggctgccaggttgctcggttatgatcagtgggcagagtggactggagctgttttttcttttggaaaaacatttctgcagtacttattacattctcagtgatttgcaaaaatgctctctctcttaacccaatgacagagctacagtttttgttcccatttaacaggttaaacaattgagatacagggaactaatccaaagtctcacagtgacagggacttgaacccaggtcatctgtcaacagagtctgtgctcttagctgctacattggatttctcatccacaaaatgtctaatcctatgtgctctttttatttgttgtagctctcctgttgattcagagggaaaactgatatggcatattattacactttattgccctctgtgagggcagagaacataacctattgataccagtgcctagtgtagcgcctggtgcatgcagatactcaaatatttgttgactgagtgagggagtgagggtgtgacatgaataaacaatagtaaggccatagaaatgccatcctagtctcaagagtcacagagatgtatgtaatcgcaggatgtcacttacataaaaactttaactttgaaaagttaaaaaacataaaattagaggtgaggacatcatgggacaattacagtgtttgaaccagtgtcaacaatttcatcccttgttaggcactcattcatagtttaattaataaatcacattgcattggaagtgtagctccaaaggaccctgatgtcagactaacacctgctatgtgacaattggggagggaacagggaaccattggaacgccatgaattccactaaatcagtgcaaatctggatttggtgcatttaacaaatggacattgagactcacagatttgttatggagtagagaaaggaagcctgaatcttgacaatgccagtatctaagggaacatttgggtgtattgaacataaacccactaagaccaactcaaataaaaagagatgaagatatcaagatatgaaggaagcttgtgaaatccaactataggaagccaggaacacctcaacattaacttagtggtgaaaagctcttagagtcagaaggcctgcatgtgagttccaaccttggcattgctgaatttgtgaccttggataagttacctcatatttctgaacctcatttacttgtctaaaaagaaggaataatcaaagtttctaccttgttgtgttgttgtgtagtttcagtgagataatacatataaagcacttggaacactgcctgacacgtaataggaactcagtaaccattaactcttattattatttagaaagtaggcagctattcactttctttttggattacatagttgttcatttcagctgactttgaacgtcagttccattgctctgtctgcagactggctttctgacagacatggtgccagggttaatttaatggcatggtgatgtcatcaaagctccaggtttgtctgtgttttcattctgccacccttagcatgatgattttcttccttacatttgttcctcatggttgcaaggtgtttgctgcagctccaggcatcacgtcctcacagagtcttgtccaaacaagggaaggagttctagttttgtgtatttcatcaagaatgagaaatactttttcaaaaatcctcctgcaaactctctttttttaggagtcagatctcattagttaggcttatgtcctatatccttgcctacactagtaactggcagggagtcagattaccaagaatagtatagaccaggcatggttaatcccttagggtgatgaaggagctgcctttctgagcacatcattatctgatcctgcaatggaatcaaaattatacttgtggagtaaaacaggggacagtaaccattgagtaaacaattatgagggcctgttttagataagcaagtttctaagccaggcaaatcagagtgtttctttgtaattttatctttttgtacatggagtctaagaggaggcagaactcttgcagttgttaatctgggataaggtaaacctgaagttctctgctccatggttgttttctgtgtactttacccctgcatgcacacacactgaatcctattgcaaagataaaagtgaggtcttttttttcaccttgctctctctgtctatatactgtcatgcaccccataataatttgggtcaatgatggaccccatgcatgacagtggttccataaactgataatggagcatacacagaagtgatatatagtacttgatattatccctgcagatcaagtaggggaaatgtttgatattcagtaatgtgctgggacattttcatatgaaaaaatagagagccaggtgtggtggcttgtgcctatgatcccagctacttgggagttagaggcaagaggatggctggagcctgggaggtagaggctacagtgagctgtgatcacaccaccgtactccagcctgggcaacagagcaagaccctgtctctaaaaagaaaagcaaaagatgttgtgtataacatctgggtttgtgtaaatactgtctgtgatgtttgtatgatgaaattgcctaatcaggcatttctggtcacatatccccatcattcagcaatgcatgactgtgtctagatgtataggtaggtagataggtacagagaaacacacacacacacacacacacacacacacacacacacacacactctccaacagatgctgcctctcccaaggaagaacctgacaataatttccagtccctgaggccatctccatccctggccttctcaagaaattcccatttttgcttgattttctctgtgggttcaatgttactgtgtcatttgcaacaacaataacaaaatcccatcagaagcattctcctaagcttctgggattctgtcccctacatctactagtgtgtggccctggctcaccccggagccatcactgggctctaccccatgtgccccacagctctagagccttatcacctgacactctcagccttgccccagcaccaggtcgcaccagccgcaatgtgaacagctctgcctatagctgaggaagagctggtctagcctcaccccttcaactggggcttgatcaggacctgttctcctagaatagacggcaacggagagacagtaacctctgtctctgataaaagggtgtaatatctgccaagtctttcctaaagagactcagcaaaagagaccaccctactgacaagtacatgtttcataaataaaatgactttatttcagatatacaagtgcctttgacagggagtttaaatctggtggctgtattccttttggcctgacttaaataggagaagagaattgtggtttcctatcagtgggaaattagtaaaggattcgaggagtgagtgactaggagagtagagtgaagtcatagacaaaatcaatgtggctatcggggcaggccaattggactcatgagaaaaatcccttggaaggtggaaatatgagacattgagactgtcattcaggaagtatggatagatctttttttaatgtttatttttactattttgttatgaaagtggcataaacatttatgagagtagagggtcccacaaattcccacgcacccaccctccagctggatggctcttgttaagtagaacaagacagggaggaggagaagatgaaagaaaggagcaggagccagtgaaggacaaaacgttcagtgacagatctattagtgaacttgtcaagagaggacaggaagctgaaatccaagatgtttattcttcttaatcataggttaatgaaataattgctaaatgagatctggcttctagcgatctgagtagggattatgtaacttgaggaagcagatcccgtgttgtaatctccaaattgctgagtgtgggagaaccaaaaggctcccatctaacacggtgacaaggctaagacagcaagagtcagtgtttatttgtttggcatttagcaattatttttctacaatctcccaggcactgtgctaggctttgtgagcatgcaaatctgaaggaccaggttcttgctttcagagaatgcagcatctactggtgaaagtagatgagaaaaatctatgactttttttttttttttttgagatggagtcttgctctgttgcccaggctggggtgcagtggcacgatctctgctcactgcaagctccgcctcctgggttcatgggcattctcctgccttagcctaccgagtagctgggactacaggcgcctgccaccacgcctggctaattttttgtatttttagtagagacggggtttcaccgtgttagccaggatggtctcgatctcctgacctcgtgatcagcccacctcggcctccgaaagtcctgggattacaggcgtgagccaccacacctggccaaaaaatctatgattataacagtcatgctatgatgaagcttttctggcagcatagaaaagatgaaagcttcttgtaggaggatgattgtcttgatctttggaaagatgaacaggcatttggtagatggatttagtgagtgaagacattctagctagacaaagtagcttacacaaagacagagaggtactcaaagagaaccttaagtcagggctgcagggctgatggcacacttgtgacctgctaaaagtcaaggtggagatggggtagaggtggccaggaagtggggagcaggggctaaaattcagcccgtgcttcgccccctggtgcagctgtatccacctggaggaggtgtctttttctggtttgacaaggggccacgtgggcagggggtagccctgtctgagtgtatttagtattctttgactaaagagtgtatgtgaggatgctcatgagtttgaacagaacccagaaaggtgatgggacattaataaataattaaaaggcagagtagtgacaaaatcggacttgtgcttacgaaagaccattctggctgcattttgggaggtggttttcaagatgttaagtctgaaggaaaagaaactagtgagaaaaggctgctccaggtgaaaaataatgggggcctgaatgacagctgtgggaggggaaggaaaggaagtggtgcattgaatatccagaaggtacagcaggtagacttggtgacgggctggctgcttgggtgcaggggtgcaaggcgaggaggatgactcctagggttttagctttagcagctcagtgggagattatcacatccccgtaaagatcaataaacccaagaactttgccatagtgtgtgctgaggtgttacctgttgaataataacaataaaagcgttctttatataatcacggtggttaaagagtaagaggagggcttcagtagtagcttttgagacagacgaaaaacaccttgatccttagttgtgtcccttcagagaatgagcaattgatatgaaaggaaactgtaggatcttttgcgttgtgatcccattcaagcacagcaaaatcccctgtagtggataatctgcccattcaagataggtcagagagtaatgcccagctgcagaaagctagttcatctcctttattctttctttcaagatgaaaataatataaatctagggtatcttaaaccctttctcattgtttttggagaaagcagttttttgttttgtttctgatggtggacatggcagcagcattctttctgtctccctgtgctcatcatgacggtgtcctagcacaggctttgaagttgaatggtcctgggtttgaattcctagttcatcaccatctgtcactttgggcagaatacttatctctgtgaacctcatctgtaaaatgtagggaaatacagtttcctcatggagctgttacgagggttaaggaaagtggagtgcttggcataggacctgcaggccacatgctggtcacaagtggtggctgtggaaatggactttgttggtgctactgtacttgttattaatgccagtgttcagatatcaagaaaagatatggcacctggaatcccagcactttgggaggccaaggtgggaggattgcttgagcccaggacaacatagcggaccctatttctaaaaaaacattttttttttaaattagccaggtgtggtggcacaagcctgttagtcccagctactcaggaggctgaggtgggaagatggcttgagcccaggaggtcaaggctgcagtgagccatgattgtgccactgtactccagcctgggtgacagagtgagaccctgtctccaaacaaacaaacaaacaaaaacccaaaaaataaacaaccaacttgcttttgcagcctttgattattccttgggcctgcatctattagatgctgattgtatatcacgttgccttctttatgggttaacctgaggagaaagagttccatgccacgtgagtcaaagagtaggttatatacatggcttgctccttcctgatgtgtcttgagatactgtgctgattatgcttgggacagagaagcataccattagactattgaaatcactggaaagaaagcagaaaactgtggtactttcagctttcacatgatcaaggtgttttcctaggatacaataggccactgaagctacacttgatattacattaataattcaataaagcacattaattaactaccagtccatggcttcagcagctaatagcacctaaagaaaatgtacttcaactttcttatcaagaaatggtcttgataagagaccgggtgactgtaactttggtcattgctctggaatgttcctgatggtgctgccagttttcattgcccataggtgcaatatggaaatttttataaatgctctcatttgatgcttttacagattaacaacatttttatattgtattgtaactgaaaacaaacgagtatttttcttatctcacctgtagaaaagggagtggtgagaattcaggagttaatattgtaaaaatacctgagataagaaatacatgtttaagtattactggttttgattgccactgaatcctcatgaagcaaccacaaaaatcaaacagaatcagggactaggaaaagtggaaagtctgtatttttatactactctaaaatctattaggttggtgcaaaagtaattacagttttcgcaattactttaacggcaaaagccacaattacttctgcaccatcccatgcctttgagaaggaagataagttttcagagtgtttaaaattagccacccatagtttgctgtaaaacagaaataaaatttggtgacagttaaaaatttacatcagtggttctcagctagaggcgatttccctccaggggacatttaacaatatctggagacatttttagtagtcacaactgtgtgtggtgtggggagggggtcgtgctactggcatctagtgggtagaggtcagagatgctgccaaaatcctgcaatgcacaggaaaggccccccagtagagaattacctggccccaattgtcagtaatgccaaggctgagaaacactgagttaaataacagctgttgggagcttctaccactggactgtctctttcagcaagaaattagccatcctgttaattgaaattattttcctcaggttatgtaaggaaaatatactcctttgctttcttttttatttatttatcgtccaggctgcagtgcagtggcgtgatctcagctcactgcaacctccgcctcccaggttcaagcgattctcctgcgtcagcctcctgagtagccgggactacaggtgcgccaccaagcccagctaattttttgtatttttagtagagacaggatttcactatgttggtggccaggctggtctcgaactcctgacctcaggtgatccatccaccttggcctcccaaagtgctgggattacaggtgtgagccacggcgcccagccttactcctctactttcttataggtttagtctggactatcttctttatatatagctctcaaattgtcagacaattcagtccccaaagtcctcaggccagatgcttgaaagattgtgactgcaaaaaaacaacaaccaggttgattcaagggttcacttctcagctgattggttcagcactctgtggacacacagctgttttgtggtgataaagagagcagaagaacgaagttggttgaggaaatgccttcacatttcaacactccccttcaaggaaagggaaagctggcttttcaaatacttgccaagtgtgaagccatccaggagcaattacagaacgttcctttcaatctttctcctctgttttccttgacttattttatgaactatttattgaatacttaccatcccaatccctatgataagtactgctcctaatacaaagaaaactcaaatgattttaagaataactaaaaaaaaattacaaagtcctgtaggtcatcacctacaggaaaaagaaatgttggacaaaggatttctctcctagattttatgtatttatatcttacaacatataaagttaagtccacatttttctatgcatttgtctattgaaaactgttaaaatacagaaatttataataaatgatacagccatatgttaattttcttgattttttttttcgttagaattcttttgctttatcttgaaagattacccagttctggggcttactagtggcaatatattgatatatagtaggcaaaattaaatttaattacaataaataaacttcattatatgaaataggttggtgttaaattggatctctcttggtccagccctaggaaaacaaattacttttcattatgataaatgtgaatgtatctccagatacttcagtggaactcactgtataaatacgacagaagagttaggaaggtggaccctggagccagactgcctggattaaaatcctggctctgccactgacactctgtgaccgtgcaaccttagacagatcactttcctcctggtgcctcggtttccttatcttcaaaatgaggataacagtcatagtatttttcttagaaggtgattataagaattgaatgagttatgcatgtaactagcacatagtaaatgctcaagatacattatttttattgtcatcattattgttgcattgtattttatttttctgtatttgtactaaagatggactgatcgatagacccattgcagctttcccaagtgtaatgtggtataaaggcacttaattctgattccacatgttcctggagatagttatcttttaaaaacacatacttggctgggcgtggtggctcacacctgtaatcccagcactttggaaggccgaggagaacggatcatgaagtcaggagatcgaaaccatcctggctaacacggtgaagccctgtctctcctaaaagtacaaaaaattagctgggtgtggtcgcacgcacctgtagtcccagctacttgggaggctgaggcaggagaatcacttgaacccgggaggtggaggttgcagtgagccaagattgggccactgcactccagcctgggcaagagaatgagactctgtctcaaaacaaaaacaaacaaacaaacaaaaacccacaaacaaaaaaaaaccgtactttgcaactaacaggacatctattgattgatttatgatcaaagcctctgactttctatgtagtatgaccatataaagtaatggaataagaccaccatcttgtattctttcttttcttcttcttttttttaatattttaagttctagggcacatgtgcccacatgcaggtttgttacataggtatacatgtgccatgttggtttgctgcacccatcaactcgttatttacattaggtatttctcctaacactatccctccctcagcccccaaccctgcaaaaggtcctggtgtgtgatgttcccctccctgtgtccatgtgttctcattgttcaactccccttatgagtgagaacaagcatcttgtattcttttttttttttttttttttttgagatggagtcttgcactgtctcccaggctggagtgcagtggcgcgatctcagctcactgcaacctctgcccccctggttcaagtgattctcctgcctcagcctcccgagtagttgggattacaagcacctgccaccccatctcttagtagagatggggtttcactatgttggccaggctggtctcaaactcctgacctcatgatccgcccacctcggcctcccaaagtgctgggattacaggcgtgagccactgtgcccgactgcatcttgtattcttaagcctgtagagcatctcagtcttcaggcagccaaggacatttattagaattggagcctctggctgccttggaagaggatgttttcaacacttttagcctgttgtaatacttgggggctactggttgattgtgctttaaaggatgttgatatcaaatatggtctggctatatttatgccaagttgctgacatgttgtataatatttattgttcctaatgcatgataggatcaaaatgctgtacacaaacaggtaaagatggttttgcagctttgggttttcaatttattttctagaacatgtctcacttgctttcctacataaagacacatgattgcttttgagcttaactaaatttagtgtggtatctaagttgtctgtgtgttattctggtgaacaaaggcacttgatcaaaatgatctcttcaaagttggaatgccttcattaaaatgttcaaatggtaaccgtccacctgaaggatgccatgaaaatattagaaatcattgttttttaagcattgatgttgataattgttagacaatgtctgaaacttttgaaatcacaaccatctaaggcagtataggaaacagaaatagcagggatgttgaaacactaaaatagtaagttttgtaagacaaaagtgaccttgcgttcaaaataagatttctaggaatttattctgttgattttagattgaatttgtagtaagtaaacaattagctgactatataaggctaaggagttacttatctatgaaaccaaaaatgtgaactagtttatctgtagggtccattttgtctctaaaatgccaaaaatcaatctaatatatttccctggattgaattcctcaagggtcaaggtgcatgcacctttgatatagtgctgaatgaagcattactaataaacattaaactgatttggatttaaatacctcttacacagctcaaatgcaggcttgaaaagtaatgtccccatggcggtaaaagcatcagtatgagtgtacgtgtggaaagatttgttgtaggaagatcagtcagccctatttcatgatgacttcaatgttgtcggtgcagcagtggagtcatggccatgacagcatcatcagagtgaactttaattaaaaacaagtggagaaatcaacagctaggatttgcccgggaaatacctaaatgacatacagcccggaagaggatttcgaggcaccattttattgcattctagtgggagagaacagttctcattataaaaattctaagaaaagttggaaaaataatgagcaccataaattagatttgaactaggcatgccttttagcctcaacacatcccattttgtatccccttaaactgtcagagaacaggcaggtatgactcattcctctaacttgggtaagcagaaattaaaataatcctatttaagaaataaatagcaaaaaggaaactataaataaatggtcaaatagaattgcttagttgttgagagaactatgtaactcagctaagtgacaacaaagggaaaaaacctaattaagttgctgaagagggggaaaatattttttcagtggcataaatcccagagcaaaaacaaaaacagaaaaaatgaaaagatgtatgcttttaaatagatggaaaaaatccttgttttctaaaatgtgaccttaaagacccttggtagaaattctaatagctaccattcaatttctttctataacacctttgatacagaatcactctttatcatttcatagttccaaaaatgtattaaaggcacaattttctctctctctctctctctctatatatatatatacacatatatatatacatatatatacacatatacacacacacacatatatatatatatatatttttttttttttttttttttttctgagacggagtctcactctgttgccaggctggagtgcagtggtgcaatctcggctcactgcaacctccacctcccggattccagcgattctcctgcctcagcctcctaagtagctggtattacaggcgcctgccaccacgcctagctaatttttgtatttttagtagagacagggtttcaccaagttggccaggatggtctcaatctcttgaccttgtgatctgcctgcctcggcctcccaaagtgctgggattacaggtgtgagccaccaaatactatatattttaaacaaacaaatacttttaagtgttatgcttactaccgactgctgcttaccagtgtggtgcatgttagctactctgaatgttggttttttatctgtaaaatgatagtaaaggctgggtgcagtggctcacacctgtaatcccagcactttgggaggcgggtggatcatttgaggtcaggagttggagaccagcctgaccaatatagtgaaaccccatctctactaaaatacaaaaattagccaggcctggtggcaggtgcctgtaatctcagctacttgagaggctgaggcaggacaatcacttgaaccctggaggcagaggttgtagtgagctgagatcacaccactccactccagcctgggcaacagagcaggactccctctcaaaaaataaatacatacatacatacatacgtacataaataaataaaatgggagtaaaaacctttacctctagagttcctgggagtataaattacatgcattatacattaaattacatacatagtattgtactgggtagctggcaggagtccaaaaaatgctgtagcagcttgtagaaagtggtcttggtatgctaaactctactctgactctgacaatttccatattttttaccaaatcagcttactgtgcctcaatttcaaaatcttcaaaaatggcagtgtgttcaaaaactgtgtgtgtgtgtgtgtcatatttatatgtatgtgtgtgtgtgtgaaacatttgagatttgcagtgtgctcaggaatataaagcatcttgggaaaaaagatgccattcaaatacaaacaaatactcatcatttcctccagttttattgactaaaagcatcagttgcaacatctcaaaatctgatctatttctgttttatggaactaaagcttgatttagtacatattttgtggtccttctgggtctaggagatgaacagactgaactggaaataaacaaagccaagaatcttaagctagagggtagagacctattcactcccacactctgaggaatttatgaccagtaagttgctctctaatgagtacagaacaagagcattgcatcttctcttaattagtttgacagatattcatttaaatttgaaaagattcccagacgtgggatagcaaaggaaagtcttgaattccttttgcatcttaattctgtttttgttatggtggctctggggaatgtcaatatctgaagacaaataaaaactcatgtcttcatccagggacctccgcattttctatttattactggccacaaaccaccaggtttcagtttgcagctgtaaagtctaacacaaaagcaacaggttctgcaataatgctgttgggcctggtttctatgaggggtgcattttttttttcttgtggttaataaaggacagggtttcaaggcaggctttaaatagccatctttacatcaaaataagtcaccacgtgggcatcatgaaaccatgaattgtttttacccatagggcatagttaccactagcccctggtaatccatggaaatgagtaactgggagaccttatatactcccaagccattttaatcagtagtaacattaacctttatgaaggttgttaaaatatagcaagagtgctgatgacttacttcactttatcatgctttaacctctagctgtgcaggctgttcactccaaaacagtgcccagttaggtagcaccaggggcctgcaacccacccctacttcactggcctggccaggcatctgtgaggctgactacataggctgagggatgccttctcctcctgcaaacaaagaaaagcctcatatgggctggttgtggacttgactgaatagagctgctattgaggaaatgtccaagcatacacaaccttgggaagaaggcacaacacttgcctaatctaccaaagcacagtttttagctctcgagggagcgcattcgttcatcagtgagcctggtccagcttcactttggcaagtgccccccaccctgtctctctcccctcactaccattttccccattaccttagagcagattccttttactaatcaactcatcttaatgaagccagaatgcaacattcaaggaaagttctgatttaaagaaaaagaggcagagcttgcaaagcatcacctgttgttctctcagtccattggcctggtcattagattatactctccggaaagctgatttgattgattggacagagatggcatagcatagcatagcatagcatagcatagcatagcatagcatagcatagcatagcatagcatagcatagcatagcatagcattggacagagatggtatagcatagcatagcatagcatagcatagcatagcatagcacagcatagcacagcacagcacagcacagcacagcacagcacagcacagcacagcacagcacagcatagcatagcatagcacagtgtcaggttagaaggcctggggaaaacccctgctttaccacttagtggaataaccttgagcaagttacttcatctctttgagaatccatttctccctcagtaaaacaagaatgataatatgagacttgggtgagttaatacatgtaaagtgctgaacacttgctatggaaagcagtggttctcaaatcttgggccctggaccagcagcattacctgggaacttgttagaaatgcaaatctcaggtcccaaataaaacttaggggtataggagaaaatacttgcaaataatatgtctgacaaggtgttaatatccagaatattttactaagtgaattaggatatacaattaacaagaacacttctctaaccattcaacatttaggaaagcttgtatatgtttataatttcctgataactgaatggagaagtgcagttatttcatttctggagtatacattgaaccttgcaaattcaagtaatctttttccaggcctctagtacatcatagtccatatagacaatctgttttggtatgtttgtttgtttgtttgttttggagacaggatcttgctctgtcagccaggctggaacacagatcacagctcattgtaacctcaaactcctgggctcaagcaatcctcttgcttcagcctcctgggtagctaagactacagatttatgccaccatgcccagctaatttttgtttttgttttggagagatagggtcttactatgttgcctaggctggcctcatgagattctcctgcctcagcctcccaaactgttgggattacaggcgtgagccattgcaactggccctcagaatctgtatctgaccatgtttctcttcaggatcagaagtctttaaaaaagaaatgtgaaaaaacaaattacgttgtaaactcttagtttcctttcaaatgaccccagtctatcagaatagactagatgttaagagcagtgttagcaggcaattaagtcttttgtgcccatccaccacttcctaacatttacctaaatagagagtctagaatatcatgtttacaccattatgtattctgtctggaagtaacaatataaaagataacattaatttactttttttcagtagatgctactgaactgtgaacatcttattaggctcgagtttagattttcaaacttgtctcaggaagctgttgctacctggtacccattttgttttatttttatttatcttttggaggacaaggagagaatgactttgaaaaatctcctgggcaagaaaggggaagacttttctgcaaggaaaatggattgtactttgttttccttcataaagggtaatgaggatataatctcaaagctacgcttgaccatcatctgtcaaaccaaagcaaataagccagtgcctgtctttccttattgtaaaactaaaagagaagataaccaccatgtggcagttgtctagccaaaaaaaatcaccctcatttcagaaaatgtttactttttcactctcattgagtgatatgccatcgaggtatgagttagatgttggcattttgtggaaaggttttctttgtttagcaaaatcacagctgttcatttctggtaattttgaatttcctaaaaagtggccatagcttcagaatttgatttttagtaacctttagcagactgagagtttttctggtttgaagattatattgaaacaccaaaaaaaagtagagtggtttgtgttttactttatgtattaatgtgaaatttggagatgaagcctcttgttgctgaaataactgcatcccctcgtcttccgctgtccacttttatatatttcctaaatatccacaaatcttgatacactcttgtagtgatttgattcttgttttgttcatatgtgtgttttttccactaatgtacacctttgggaatccactcccagcctttccatgatttcttctgtaatttgggttttatttttaaagctgttggcatccgtgtagagggatcctgccgttacccctctccagatcttaaggttatctccctattctgttgattgagagatccaaagtcaaaggtgagtcagggatttcgtgtgcaggttctcactgatgaacatgttttctccagacccagctggggggttaagattcaggcaattggtgacgagaggggctgctttcctccaagttcagtagccctccctcaaatgagaaactatttcacaacaatctcaacccatttgtcctccactgtggatagggatgggggaggggcttgcttgaagagttctaaggtgatttttttcccattaaaaaaattgcagtaaagtatacataacattaaattgaccattttaaccattttaagtgtataatttggtggcattaagcaccttcacattgttgtgcaaccatcaccactaccaatctttaagtgagttgaagatgatttttttaaagttacttcttgcctcagctcccaaattccagttgactttgtgcgccctctctctgtgtctctctctctctctctcttaaagtctgcgttctcattctgattatttaacttggagagtgtgaaggattttttttttttaacactgcatgatgaattggtctcagtggaattcaaacgatctcgttgttttggttatttcttatcgggaatgctggatttttttctaagagccatggcaggggtgaaggggcacaagggagccacctccttttgagtcaatttagcaaaagtgagaaaacggtggggtgataggaagtcattcctggatgctaaaggggcatcctggctccctgaagaaactgagactcccagtttttacgtagtgaactttctggctgtaatttagggcaaactccttactgtttttatatttgccctccattgataagaacttcttaaggtcacagtgtccttgggtaatgaagctaggcagaggaaagttctttaatatttacctagtgtgcacgccataccaggaactctacaaggaaacacacggaacatgcccagcctctggatcagcctgacttggggagactgcccgtcaggcacaccctgtgctggctccagcttctggagtttctggcgaatcatacctgaaaggattatcatcttcacccagtgtccggatcatcagccatggaagtttgtttgttcaacacaggctgaatcagttccatgttgaataacacacattttccttcttgaaatattcttagaacaatgttttcattttctccaaggaaaaacttgctcagacacagttctttctgatccaaaccccctgcttgcctctgcctcctctcattgttgtaaaacccaagtgtttctattcctctactctaaacccgctcagagggaattctgccttttgatttggaggtatatttttccatccacatatggcagtatccagtaataatattatacatctaaaggaaggagcaaaattttaatctgtgtgcagctgcatgtatcctgcttctctcctatggcaggattttctagttaaacctctggctagttggaagatgatattagttatagaactagtttgtttagccaaaaaagatataagtggaagcagtactcatgatatagaaatacttaaaactttggagagacaatctgaagacctaactggtgtgttagtcagtaagttttaactccctttaaattgagaatgaatcccagggcccaacattatgagatgctaagtagcttctaaagggattactgtcagacttaaaagtgttttcttttggccagagctttagtggtcttcatataaaatatcagctgctattattattaaactttctatactgaaaaataatgtagtataataatgatattatttcaggcaagatttagttacatgttacaaatactttaaaaagtaggctgggcatggtggctcatacctgtaatcccagcactttggaacactgaagtaggaggatccattcagcccggtagtttgagaacagcttgggcaacatagcaagactccatctcaatcaatcaatcaatcaagaagccggatgtggtggcatgctcctgtagtcccagctacttgggaggcagaggcagaaggatcacttgaagccaggagtttgagtttgcagtgagctatatgattgcaccactgcactctaacctgggggacagaacaagaccctgtctctaaagaaaaaataaaagtagacactattgaatagccaactaagttagagttgaatccatgtaatatcagtctatcccagcatcttatgaggtgggtaaacaccaagtcagtcaacttctatgttataaaaacaaaacaaaacagaggcagaagggagaattcccagcataacgagttggtgggggcattgtaggataggcaggtggttcagcgttcctcctcaaatatccctaactcccacctcaccactaggtccagtgcagggaactcttctacagtatttctgcttacccagcctctccttgcatggtttcccactactggacaagtcagttcatttcttatcttcatggctctaattgttagaaagttgaaattgtgagtcctcaacactccaccttcaataattgctgtccatactcatagccaagacaagctgttattttatgctgtcaagttttagaacacatgcagagctcacataaagcatttaccatggattgttagtgttttagcagagttgaaaggagtcaagtaccaacagtacatgagaaatatcttatccgtctcattaacacctcctttgctttgataaaaagtcctcaagtggtcttgggaacatactacagatgtgcagttcggcatggaaattggaaaactcagatagggcttcgatggaagtcacccattcaaacctgtcttcaacttccattcgactcctcttgttataatgttgatagcaaggaagagagggccatacctaggttcaagtagtgggcatatctgagaagagggctgggggatagctggtcactcagctacagctttttattggccatgctgcatgctcaacttcactcctgaggaaatgggatcaagaacaacacaatatcacttttgctcagcaagccactatatcatataatcacagagctagaaggtcaacccccgtattttacagattgtaaaacagatttaatagcctttgacagaaggtttgtaaacctaaatggctacaggaccaagaaagaaacacaaatgaatgaaatgttccaggcggaaaatctaaatggcccctttttcgttttttgttttgtttgtttgtttgtttgtttgtttgtttgtttgagacagagtctctctctgttgcccaggctggagtgcagtgcagtggcgagatctcggctcactgcaagctccgcctcccgggttcacaccttctcccgcttcagcctcccgagtagctgggactacaggcgcctgccaccatgcccggctaattttttgtatttttagtagagacagggtttcaccatgttagccaggatgctttcgatctgcttatctagtgatctgcctgccttggcctcccaaagtgctgggattacaggcatgagccactgcgcccggtcctaaatggcccttttttcaagaacacaatgaggagtggtgaggactggggcaaatggaggactcgtgccccatctaaaggagtcagctgcttctcaactctaataggttatttttatttttatttattttttattttactttaaattttgggatacatgtgcagaatgtgcaggtttgttacataggtatatatgtgccatggtggtctgctgcacccatcaacctgtcatctaggttttaagccctgcatgcattaggtatttgtcctaatgctctccctccctttgctccccacccactaacaggccctgatgtgtggtgttcctcaataggttcttatgatgaaggaatgcagacccagtgttgccagaaatctggatttttaagtgaaccatcacaaatgactcaatttgaaattttaaagcattatgtggaataacatggtataggccaaccaaaacaagcctgggagtcaaatgccatttgcagatgctggcctggggtcagagaggctcatggaagggttgtgtcctgaataaggcatttgagatgggactatgaatgagtccagatggttttctacaataggcctttgccaatcccttccctcttctccagaaaaaaattgagctatgatttgtgccattctgggaaaaatgactgttgccctctgagatcaaggagcttatcagggtgcagaggaggaagctagctgagaatgggagtgtggagcatggatacaaaagcagcaaggacagagcatgaacacaggaggcacaaagttctagcacatttgaagacacgcctaaactcttgccattagaaccttcaacatttttccccttttcccaaaatcgtccctttgcttactacatattgtcagtaccgccttcaaccaaaagcatagttaatggatttgatatcaacgctctcaagtcttaatacaccgtgttacctgtgacttcgactgacatatcctttccaggggatcagatgggaagggtgcctgacaggaacactggagaatttcagtcctgatttgaaatgaatgatttaagccaactgatgccgaaacgtggtgtgttcagaggacccgctggaggaatgcagcgttgtgcctctccccatttatcatggtgtttacaaatcctgttagaagttgaaagtaaattatcatcctgctcttaatgactgttttttagctaagaattttagaggtgattgagagtgaacccatcactgtagtcatgtgaaggagtggagggaaaggagtgggggaggcacccagggcatgcataatacttgatctaggagaggtgctcatggccaggtctggaaagtcggaagcacctctccttcagatcattcctgtcccagttggatggcttataaaatgtggggtgtttcacattcacattcactgggatttgagttttgatcaggagacaggatcaaagaatcctcagtttcagatatgtgtacaaatatgagtggtgcatcaagtgaggaagacaacgccttcgcttcaaggaactccacgctaatctcctaggcttctcagtcatcatatctgagaatatttatcttagaggagagaagactcagaggggttgtgtctgccttctgatacttgaaaagaccagtatgggaaagcaggattagactccagagggcagaattaggaccagtgggttaaagttaagggaagcagaagtcagtttgacattaggtttgacattagattctttgaaaataaaaaaggcctggggttggacaacactttggtagcagatgttctaaaaaaaacattgcagcatcatacgggggttaggtaagacgaagttcctgttctcatttaaccttgagattctgtaattcgaatctggtttggaatcttgaatggaccaaccctcatgcatttcctgcctcctggatcataaataatgtttttaaaacaatcatctggaaacaaattacataaacaataatctgatttgtacacacatgttcatagcagcattattcacaatagccaaaaggtggaagcaaccaagtgttcattgatagatgaatggataaacaaaatatagtgtatccattcatatgcatacacacacacacacaatgaaatatcattcagccttaaaaaaatgaaattctgactcatgctatcccatggatgaaacttgaggatgttatactaagtgaaataagccagtcacaaaaagacaaatactatctgattccgattatctgaggtacctagagtagtcaaactcattgagagaaaaagtagaatggtggctgtcggggactgggtaagtggggaaagggagagctattgcttaatggtgactttcagttttgcaagatgagaagcatcctgtggatggatagtggtgatgggatgcagcaatatgtttgcacttaacactatgaactgttccccaaaaaatggctcagatagtaaattgcatgtgtattctaccacaatttaaaaatacctaaagaaataacaataattggtctaccaattggacttccctcctgcagaagttaacatggaacagatagtgaagttaaacacataataaaagagatacaaaatgtgagcaaatctcagaagtcaaaattaaatgaatgtgtatttaaaaatcaacctactttgcatttgaaaggtgaagtagcactgtattttaactggatgagtattacccgcacaggctaatggtgcgggtgaagagcctggtgaagagcacaggctccagggccagaatcctgggttcaagtcctggctctgtcttagactagaccttgggaaaattacttaatctttctgtgcctcagtttcattatctgcagaaatagagttatttgtgagacaagtaagagaatgtataaaacatttagaactgagcatggcagatcatagattaataatgctagctgctgttgttgttataaggcagaatgaaaggctgtgtttggagttgacctgatgtattaacttttactcattttttcccctaaagaatttatttaattcacataataaccatgttggtgtttgaatgatatataatgctttaactgaatatttttctgtcccagtgggtgacattatgaaaataatgagactgatgatacattaatacaaagaagtttttgtaatctaaggaaatttacttttgaccacagtcagatatttttcaggcttcaactttgtagacttatgctaagatgtatgactacttcattgcattacagaaatgtaatttaatcatctaagggtttttggtttgttattaaagttttaattctctaaggtatagtgtgaggctaatagtgttttctgagttccaggaattgacctatatttattgtattttttaaccaataattaacacatagaatattaattaaaatatgaaaactaaatttaaggtacctggatagtcctgtaaaatctaaaacttttttaacactaaaatattaactgttagaatgagaatttgaaacttgtaaacacataaggtgtttgtttactgtatattaggtttgaaaattatgtatacatctatctccacattggtatgatttgagctgagcttagaaacaagatgctggcaagcatgaaaagttgaacatcatgaatataagtgtggctgggcgcagtggctcacgcctgtaatcccaacactttgggagtccaaggcaggaggattgcttgaggccaggagtttcaaaccagcttgggcaacacagggagactccatatctaaaaatgaaaattaaaataattagctgggcgtggtggcatgtgcctataggcctagctacttggggaggctgaggtggaaggatcacttgagtccaggtgttcaaggctgcagtgagctatgatcatgccattaaactccagcctggatgacagagggagactgtctctaaaaaaaagtaattaatgttgttaaaaccacaactcttacataagcagttactatattaaagatgtatgcaatgactattcattcctcaaatattttttgattccttgttatgtgatgggctaccctgcttaccaataatacagattgaggacttaattttttaaatctttaaactttttatttgaaaataatttcaaacttaataggaaagttacaagagtaagaacagtacacaaagcactcatttaccttttatccagtttcacctattgcccccatttgctttatcacatagcctatgtactataatattttttgaaccactgaagataagttagagtatggcccttttatgcctcaatatttcaatgcatatttcctaagaacatggatattctcttttatagctacagtataattgtcaactctagtaattttaacattgatgtaatactttattttctgaatttctgttttgttagttgactcaataatgtcctttatagcttattttttccttccagtacaggatccattcccaggcctggtattgtatttagttctcatgtctttttagttgattttttcttgagacgaagtctcactctgttgcccaggctgcaacctctgcctcccaggttcaagtgattctactgcctcagcctcctgagtagctgggataataggcacctgccaccatgcccggctaatttttgtatttttagtagagacggggtttcacagtgttggttaggctggtctcaaactcctgaccttaaatgatccacctgccttagcctctcaaagtgctgggattacaggcatgagccactgtgcccaggcttctttttcatttcttttaatctggaacatgtgccatcctttctttaatgaattgtgatttttgaagaatataatcctccttgttttcaataaaggacaaagaacacttaatttgactttctgacccatattgtgtttgaatgaaaaatgatttactctgctggattctctgtggagccccgtgatcacagtgctgagtccctgtgtcatggtacttcagcttggaatatgaggtttctaaatggaccaatccagtcttgggagagcagcctgctcttaaagagggttattgaccaaatgtcttcacattgtagtgaaatttataaacatacaagcatttgcctaaaaatttctgaaatactgagtaatcccatggtcttttattcaattattttcatagaagtgtgaaagcaagcagtaaaagagctgaggggtgtatccagaagttcagtggaaacatggggatacagacttactatctaatgagaggcgagctactgtttttattgtaagagacagagctgtaatggtttagaggaaaagtggtgaagatttgaattaggggattgtagtagaatgaagtagaggggacggtcacacaaacccagagggctttaagaaacaataggattggccaggcgtggtggctcatgcctctaatcctaacattctgggaggccgaggcgggtggatcacctgaggtcaggagttcgagaccagcctggccaacatggcaaaaccctgtctctactaaaaatacaaaaattacccaggagtggtggcacatgcctgtaatccgacctactcgggaggctgaggcaggagaattacttgaacctggtggaggggagaggcaggagttgcagtgagccaagatgatgccacagcactccagcctgggcaacagaacaggaatctatctcaaaaaaaaaaaaaaaaaaaaaaagaagaaaagaaaaagaaacaataggatttgatcactaattttttgtgagggatgtttgaagctcatcgacttgtggaattgtgaggttgttagtagaaatgggcaatttgggaagacagtctgggacttttttgtttgttctgggaaaaggtgatgattttggtcttggagaggtcttgggctctgctgatgaaggtgtccaacaggcagttggaaatgtagaataaagccaaggagagcatccaaagacatattagagatacgggaattatctacatagagggtgaccattaaagatgagaatgaatgggatccccaagggcgagagcagaagtgcccaggagaggagggctggtaccttggtacttacaggaagaagtaaacctagcacaagtgacaggtggaggactaataagaacacattgtttcagaggccaagggaagaaagttttagacggagggaatggttggcaatgccaacagcaagggagtgtgtggacactgagaagaggcaggcagatttggcaattgaggtggagccgtttggacaaacttgaaagcccgactacaggggattaataaatgtgagtggagaacggtgaggcagaggcggaaagggcagggggctgtgtggcaatgttcagctctagaggcagtgaaaagatgggaacttagggtcaccaggctgaggaacccgatgaccatcttcctgtgtaacgttcagtctttcattgtagtgaggaggcatttctccactctttaatgactcttttaaatcattcaacagtcacttctacccagaagcagatgaaaggatgaaggggcacttttccctgggtcagcagaacagcaccttatcagcaccattatgtgatctgaagggactaggattaaaacccttaagcatcctgccctccagggaaatgtggaaacctgaagcagccccttataacagaaagactctagaaaagtaaagctggtttcagtgggatttctgtggttttctccattgatttttcatttccacctccaagagccttttattgccaagtattaaaaaaaaaaacaaaaaacttcctgtcagtcaagggcagagtctcagcactgcagagagcctcacactgggctaacacctgtcccaggaagttaccgaatgacaagctaaggtgatcatcagactgttccagaaaccctatcaggagctgcagagtcacctggtacattagcccagcaggcccaacatgtcccttcagagaggctggactaacgctgattaagagaaaacacaaacagtacaaagaaggattgctaataggaattattttacacacctttctagttcacaaaccaccacctttgcaccaaagcaaacttgggctattgagccttggaggttatttatttgtatgtgcagggcagtggtttgggtgaagcttgattttctcaccatcattctttctttttccttccaccttagggaacaaacagaccctctgtcacatttttataaagagtagttgtcctggtgttttcaaagttgggttgtgcctcagaaacaaaacagaaattacaaagaagtgtgtgaaatgaatcagtgtgttaacatctgaactaatatggagtaagtgtttatgctgcttgtttcagaactgcatattcagcatgagatacaggtcccagttgcctaaataacatagttccagcgttttctttaggtctgagacagtttgaatgttctttttttttttttttttgagacagagtctcactctgttacccaggctggagtgcaatgacacgatctccggctcactgcaacctccacatcccgggttcaagcaattctcctgcctcagcttcccaagtatctgggattacaggcacctgctaccacgcctggctaatttttatatttttagtagagtcggggtttcaccatgctgggcaggctggtcttgaactccttacctcaggcgatccacccacctcggcctcccaaagtgctgggattgcgcacggctgaatgttcttccattctttatatcccatttagttttgggaaattggacgactagacctagtcgtgctaggggcactcctatgcttgatgtcagaattactcattttcccctaggcactttttctttgtgaatttatctttaaaggacagcctcatcagcatggactcatctggtacaatactagtttgtagaaccatagcacttgtattcactcttaccttcttttcctggaaccaaatcttttacttgaatgtcaataaaatggcccttctcagcaacggaacattcttgactcctgaggcagggaaggaagccaggcacttgtacatttgttttcaaacgaactggttcttatgttgtaaatatttaaccattcaccatagtattcctaccaaagtttccatttgattttcagttaattccatttctcacaagcagataaaggctctttcactttccagaaccctcttttaagcaaatatagattatatttttggctcaagaaggaacaaaaaatggaatttggaaggcatattttttccttggttgaagaaaggaggccacggggaagtaattccaccaagaaagtataatgggtgttatggtaaatcttcatgatggccatgaatatttttattgttccctaccctgtctttgcttaaattgctagagttgtggctaaaagcaaagctgggttttttcttctcaggtttatagctttgagagtcgggagggagggacattaagtgtaaaagctactgaagagggccaggtgatcttatctctttaatgaaaatgactgcagacagcttccttccaacttttgagttatctgggttcctgagtgtccatttctcactggtgtttgctcttaggatgaaactttaggaatgcattaggcaaaagattatgatttacagcataccactgtttactgttttagtaatatatttgttttagggaaaagacctccttataacacatttcatgcttttgatttaagttgtgactcctctttcaagtttgggatattttgcttccaggagatgcattttggtcttttccttttcttttctcttcctttcttccttcttccctataacaggtatctcctgctgcaccaagtctgtgggcaacaatgcaaaaagtcaaccaaaatccaaaagtctaagctgatcccttagtataccagttttaagaatgtctggtgtcacttggactacaaatgacttttaaagtcaaagaccataagcatgagtcaaattggaaacattaccttgtagagccagtctgtctgcctggtcacttaacagtttataaaacttgactcctagctagaaagttaattgccagaggttccaaggaaagcactggactaccactcggaatcctccatttactacataggccaaatgatctggctcttttcaaggagttagcatgaacattctacatttttcttatccaatatgcacaaatatttctttgaagaaagatgacattttaaaggttcttattcaattaaaacttcctaaagcactttttttccccattaactgacaaacatgatacagaactattttctttcaagattattatgcctctaaatctttttctgtctctttcctatttagctttggatttgcacaaaacacccaagcatttttcagcagtgtgagctgagagtgtggaattgaatgaacacgcctgggatttgaaatgagagatctgggcgggggaaggggagaaagatattccttgcatactcatacgccataactgaggattctacattttctttctaaagcatacagtggagatggtttatttctgagagaaattctattttagttttgttttgcttttaaccactatcatgtttgtatttgtcattcttgtacatggattttaaatttaggttattttaatttttctaaccaaatatttttcaaatatccgcttatgttggagagaaaaggacattccaaaagagttacctatagtgtttttaacacataattaaaatgatcataaaaccttcacatgtgctttttatttctcattaaatgccagagggaaaggcaattgcaggcgtgtagtattccgacatttcagcgtgctgcactcctgtccttccgtcgtctggggccacatctgtgatcactgtcttgtgcttgccaatagaggttttcttctggatgctgtgtctgctcttggtcttgtggctttaacaccgaagagctgttgtctacaaaagacagtacattagagctccagagttcactcagctgcctgctttgctcccgtggtgacttcattcttgggaagtttttaggtttcctgggagatgaagcatgagcaacatttgctccagcctgagtaatttcagaaggccttgagtcctgttttgttattcgggtttccaagggtgggtgaggggcatgagaattcccagcagttaccactacacgtgaatactggtatctggcgactctctgttacgtttttaaaaagagtggttatcgtggtgtttttaaagtgggactgtgcctcagaagccaaacagaaattataaagaggtgtctgaaatgaatcaatgtgttaacatctgtactaatatgagtgtatatgttgcatattccagagctgcctcaaattcttttaggatttaataatattgaacattggaaagattgaattaaagccaggtaagacttgctatgtttacaaaattgtttgatgtggtctacaatggattttagtatttttctgagttaaaaagaataatagcatatgcttcataatttttgcctttatgacctattgtttcttcattaacctcagtacaatgatattatattattattggaattgaaaaggttcctgtgtaagccttgcttggtaattcaagtacccttgaattgtataaggagagcgcagatattttaatgccagactcctagtttatgcagtacttttgggctgtagttcccatgttaaatgagatgatcagccaaatctttgctttgccaggaaccaaaatcatttccaaactacaatagcagtatggttacagtttcagcttcatcagccccaaagtaaattctaataggtgctattgaacatagtttaaaatatcctggtgagaaactataggccttaaatattctgttttcaaattttttacctaaccccaaatagctagcttcttagttttatacagctatgccaaaataaaatacaacagaacattcttcttttggggatatgaaacaaatcttttcattttcaacagtgataaccaatcttctgtctccctccctctccctcaacccctcacttccctccctctccttctccctctttagtccctcctcccacccagcctctccctctgtctgtcttttcttgcattacctaaagccctcattgctcacatctcatcaagataaagtcaagatttacacacaatataggaagtgtttctctccagcctcatacctgaccacagcatccttcctttcctacttcacactccaatcgccgagaaccatgtccagttcctgagcataccatactttctgcctcttcctatgtgttacttctctaactagaaggcttatcctcccctctctaaaggctggcaaatattctcatgacatcatgtctttgtctacccctataactaaccatattgtatttaaacttctctcttcctttttagactctaagcaacttgtgagcaaggactgtttccatctcgctcactattatacttagagcctagcacagtgcctggcatacagtagctatacagcacatatttgttgaaggctcaattgagtctagttgtcactcagtttgctttaaacatagagaactctccttaacttttcgtttattgttggagggaagagagcagagggcagaatgtgctctgtggtgttttataactctgcaggaggcagctctttatagcattatatagatttaaaattgaagcacaaaatggttgtgaagaggaagcacgtacgtagggctgcttcatcaggcgaaccctaattcatgtaaaattcaacgctgggaaatcaaaagaaaggaaaatcactctctccaagtggtagaaatgatagtgggattttttttatctctaggtggagatagttttaaaatttgcctccagtctgctacattaattctatttgcctgaatattaattgtgggtatttaaataagacaagttgagtttcacaaatgctgcttgctgctacatttccaccaaaaaggcagcttaaaactgttctttcttaaactattccttcttaaatacatacccattgtctatctcaaacactgcttaccattcatccccaagttgtacaaataagaaaaatttcagataaccatgattgcagttatgaaattgctgggattatgaagcataatcttagtttaacatgcatgggtagaattacctgaagtagctgccatttattcagagtcaatgccaggcattttatttgcatcatctctgatcatctcaacaacactgataggtgggtggtattgtccctctttacagaggaaggaattgaggctcagagaggtgaaacaccttggccaagatcacctagtaagtggcaaatctaggatatgaaacttggtctcttggtccaaaagcttcctttctttatagcatatttctcttcctcaattaaagcactattgttttctcaggcattggatgtttgtacaggtcattttagaatacttttctttgtgtataccatgatgacatcatggctaatgggctaccaacaacagccttcttgaattcacgcccacagacagcattgacagaactttaggattttaatccaaactgttgggagtcttcctatgtccaaatgattaggaattgccaaacagatgagtctacaattgtgtttcccagattctacagccatattacagtatatagatcgtgtgtggctatgtcaaattatttgcttctgttaggatcacagcactttgggggatgcgagtaggggctttttctctgaatattattctcagattttctcccaacttccagactcaggaggttaacacgtgaacttctggagagcagcctgcagggggagatcctagggttcacgtaaagcttacaaaatagcctaaaacttgtgtcccaagtcagacccttcagaactgtggttttatttctggaataacatacaacccaacagccatgtctttagagacttgtggctgaattagttctgatattttaagaaaattaagtttcaggtcttgtagatatgccagtaagatgtccactaggtagagattctacccaatattgtgttctctattgtttatattctgtacatgatggtggtgacaaggatttagggagaatgcctattttaagctctctggaagtcaactgccaagaaagtcagcaacctgtcttcctaaaattatccacaaagcctatgattatcataggtttaaaggcatacatattcctctgttttgcaaaagtctttttttttttttttagaaatggggtcttgctatgttgcccagaatggaaggtagtggctattcataggcatgatcatcatgcactgcagccttgaactcctggtctcaaatgatcctcctgcctcagcctccccagtagctgggactacgggtgtgtgccaccatgtccagcccaaaagtcttactactaacttttattcacgaaggtaattcaaaagatagggcattgattccaacttatagaagctataaatattagccccaagttagttcctataattcaacattggcaacctccccttcgatgagaatgtcctttcaggtgcttcttcttcctttctctatcctggattaccatgtaggccttttgaaaatagacacctactttatgacagtttggacagactaacaggtctgtatgaaaaggcattgaaaatataggcatgatttccccaaaagaaacctagaaatggctttaaaaagttttagaaagtgagatataaaaaaattatagagttaacattgatgttaggaaagtagtccaggaagggatcttagatcttacgttagaatgatatttggctacttctttcactattagcaaattaatttatatagatcactagatttttccctgtttctgaaatccttggttcactggggaaatagccttaaattcaaagagagcaaggtgtatcattatttgtctctgtggttcagtgagcaggttggatctctcatgtgtttcttgatatgaggatgggatcaaccaagaggaaatgtgaacaatgcttagtgaaccttaaacaaattaatgcttttccaggaagtgaatgcagtggggcacagacgttgggattactcctaacctgcagtgatacttgtcctttacttcactcaacaaatacttattgtgtctttgtgccagggataaaacatgccaaaatccctgccttagttgagattatatacagggttaggtatagatagtaaatgttaaacataactattttataaaaagtaatttacatgaatctataactactttataaagaatatttgaagggcatttaaaaattataagtatcaaagtaaagaaataatattcaaagattagtgcatgggaaaaaatggagaagaggatcaggagttctagggtaggaaaaagggtgacaggttgaattttttttttttgatacagggtcccgctttgtcacccagcctggaatgcagtggtgcgatcttgactcaccgcagcttggatctcctgggctcaagcgattctcccgtctcagcctcccgaatagctgggactacaggtgtgtgccaccattacccagctaagttttttctgtattttttatagagatggggttttgccatgttgcccaggctggtctctaactcctgagctcaagggatctgcccaccttggcctccaaaattgctgggattacagatgtgaaccaccacgcccagctggttgtaattttaaataaggaagtgagggtaagcctcaatgccaaagcaacatttgaaggagatgaagatggtagctatggtgacacctagtaaagggaattgtctgtgcaaagactctaaggccaagaccatgcctggtctgtttgaaaaagagcaagaaggccactgtggctggggcagagtgagtgagggaggatagtaccagatcaggtcaaagaggtaacgggtatgtggggaggagtggatcatatggggacttgcagcccgttgtaaggacttgcttttattctggtgaaatgatgaaaggttgcagggttttgagcagagaatcaacatactttggcttatattttagaataatcactctggctatgaagactggaggtgagcagataagggcaaggcaaggattccagtgaggaggctgtggcacggatccaggacagagatgctggtgacttggacctggatcatagcgagggagatgggagatgtggttggattctgtatttattttgaaggtcgaaacaacagtatctactggaatgctcaatgtggggtgagagaaagagagaagtcaagcttttagtgttgagtaccaggtggctggaactgccatcaactgagatggaaaagataagaagtgaaacaggcaagaaaggttttaaacattgtaaattgtgtatagctactaaaattgggtgcagatgttaatgaggcagattggtgtatgaatctggtatttaggagtggaaactgggctggatatgtgaattttggagtcttcagcctatatatgaaccatgaaatttccatgggaagttgctaattcctgaaagtcccgtctcaagaagttgcagccaatgacacaggactcagtctagtcctctggccaagttgatcttgacttttattgtcttttaactacagtagcactgcaccaatcataaccagctacacttgttagtttcattgttttgtatttactggttcaccatattttcataccacgtacagcttgaactaggggtcatctactaaaatcctctcattttacagataaagaggctaggctcagaggagttaaatgacttgcccaaaattacacgaaatggttacagcgggaccaggagtgcctacctttcagctctttcctcttccttacaccagctagagcacttgcagcttcattagatggagcaggaaaggtgataacagagaggtaaagtcagaggtcatttctgccaccaattgtttccttcaaagcaaaactccaggtagtagagctctcttatgcattaactttggtggcacttgcatcctgtacagtaaaaagccacaggcgaagtctagcagacctgccctttgaagggagagtcggagagagccttctgagttgctcaggccaggttttggataaatcagggggtgaccattggattataggaagctgggacatggggaaatcattttttttccattcaatcagtcacaaaaaagtgattcttttcctgttagactaggaaacttaaggaagaaggataagaaagagaatgtaggcgactctgccacgagcttttgatgattcttaatgataaattggagaagcctggaaagagctaaaggaatatagaattgaacatactttttatttgactgtggattacagtcagagatatattccacttgaatttaccccaagtgccagcactttcttagctattgtgaattatgtggatgggctactgagttccaatgggtcattatgtataatttgtaaactgctgttccacttagagagaattaactcattgaacaaatattcatgggttgcaggcatgggaattgtaggatgaataagatagatgaggtatttgttttcatagaatttacagtcttataggggtatgcagacaacaaacaaataagcaaagaaggtaagttcagacagtaataagtgctatgaagaaaatggaacggggtcttgggatagagagagattgagtgaggtgctttaataggagggtcagagaaagacaggtgacttttttttaatctttttttttttttttttttttgagatggagtcttgctctgttgcacccaggctggagtgtagtggtgcaatcttggctcactgaaacctctacctctgggttcaagtaattatcctgcctcagtctcctaagtagctgagattacaggtgcctgccaccacgcccagctaattttttgtatttttttttagtagagatggggtttcaccatattggccaggctggtcttgaactcccaacctcaggtgatccacccgcctcagcctcccaaagtgctgggattacagacatgagccaccacacctggccgcaaggtgacttttgaactgaaacctaaaccataggaaagaaccagccacatggagatgtgggctattccaggcagagagaaaaatcccaagagcaagggccttgatgtgggaacaatcttagcagtatgacagaagcacagcgagcagggttgggaccacatcacgtagggcctcataggccatagtaagaattgtattctaagtatagcacgaggctactggagcattttaagcaaaggaaaaattattatcaactttatttcttgaaatcacactgagattcctttttttgaggaaatagagtcaatgagggaaaaagtcgaagcagagagggagaccagttatgaaattattacaccaatctaaggagatggtggtagcttagggtggtagcagtgaagatagctgaagtgatgaaatttgggactgatcggatcaactgacttgcagatgattgaataaaaggattaagggaagaaacaatggaggagacactgggttttatctgaataattgggatggtaatgggatcatgagtcaagatggggaaaactggagaatagcaagtttgtagagtagaggttgaggggttgggaacagcagaattcagagttctattttagatttattatgttggatagaccaatctgacatccgggcaggtaattgtacaaaagagtttggaatctgagggagagagagagccagagagagaaagttgagaattaccaactttgtataaataatatttaagttcaaaggactggaatccctcatcctaggaaagaatgtagatagagatatgaagaccaagccctgggacatatcaacctcatgaggagatggacccagcaaaggctacttaaaagaaacagtgagttggggacaaggagagaaactcagtagggtgtggaggtgtggaagtcaagaaaagaaagtgtttaaggaggcaatagtgagctgtgatgaatgctgctgaggggtccatgacataaacacaaatcattgacttggcaagaggtggctttgacagagcaattactggggatggaggggaagaaggctgaactgcagtgggttgaagggagaatgggaaatgacaaaatgaagacaagtacagacaatttatgtttggagtttctatcaccattttagctagtgatacggtaatgaggcaggactacaagcagtattggtagaaaaactcccaattattaggctttaaaaaggcgaattaaaactaatacatattcctaggaaatttgatctgctgtgtctacttggggggattaagttttcatggagacaccttgatgagtatccatgttgcctttaccaatcttgaatactaatttcttggatctgtttcctgcagctctacccctcaaatagaacaaaaagcaataataagaaaaacccagtatttatagagcacatagtgtgcagtttaaaggtgtttttgctcattttatcctcacaattcctcaggaggtaggagctgttataatccctttttgataaggtcacacgactattctaaactccaggtgatcaattgacaattgaaatcttgcagccgagcgcggtggctcatgcctgtaatcccagcactttggaaggctgaggcgggggaatctcttgaggccaggagtttgagaccatcctggctaacttggtgagtctctatgtggtggcacacatccgtagtcccagctactcaggaggctgaggcatgagaatcgcttgaatctgggaagtggaggttgcagtggagggacactgcactccagcctgggggacagagtaagactcagtctcaaaaaaaaaaaaaaaaaaaaagaaaaagaaaaaggaaaagaaatcttgttaactggccgggcgtggtggctcacgcctgtaatcccagccaaggcaggcggatcacgaggtcgggagatcgagaccattctgactaacacggtgaaagcccgtctctattaaaaatacaaaaaattagccgggtgtggtggcgggcgcctgtaagtcccagctatgcgggaggctgaggcagcagaatggcgtgaacccgggaggcggagcttgcagtgagccgagattgcgccaccgcactccagcctgggtggcagagcgagactccgtctcaaaaaaaaaaaaaaaaaaaaaagaaaagaaattctgcaacacaccttgtacttgagttgggtggtgcctttgtttcagcaaaaaatcttcattttctctctccttctcacccaaatacccaatagtatgtttaaataatagcattgggattggaacccaggcagtctgggagctccaggcccctagtctcaaccaatatgctatcctttaataccaggcaaatggaagggagactccggaaaggaaaagcagatgacattttatcaaatcagtattggtatagaatgacatagatgttataatgcattgagctagaatggaaaattttatcctggagaacccttcttaatggtgtttttaaatctgtgtgccagtagagcccatactaatggagtgctagtcctcaatattctcccctaacacccattctcactctgctaataaactgtccctcaaaatcaaaatgaaagtgtcacgtatgtacactttccttttggaaagcattttggtatttttctacctgacagctaggaaaacagataattgattgatttgttgcctttattgtttttaagtgcctcttacttcgtgcatagaatttggggcatttcctgaggagtaataagccctcaggaggagaccttatcctccaaggtatagaaagtcctagcagacgttggtggccaggaagtgccctagactggaattatttttgttgttctaatctgaaaatgacaacatagaacacagccaacagcatgcagcattttattatggtgatgcagctttaattggtatgtagagggcatgcctgtgaaattagtccttagtgtattggccaatcagatcactttcaacgtttcccaatgtttagtttcatcttataattaagtaataatgatcatttcctggcagctaatgactagctagaggagttagaagcctcattaggtttataatttatcaaactctaagcttttcatcagtagtgttgcaaaaagagaaagcatcttcaaattccaaaatgattcaaaacaatctctaaccgtatttcatatatgtattcacttgttctttgaagggtgactttatttttaaacttttaaaaataactgtattttattatataagcaggaaaaaatgtttgtgtgacttagaggaagaaggaaagagatgtattgaactctgttagcacatacacacactctaaaagcagaattgatagaccgtgtttcctttaagaatctttttgtgacaattccacaccctttcctgaagctggcttgactatccattaattccagcaatagcatcattgtatttactccacagatatttattgagcacctactgtgtgttgggcattatgctgacgatactgcaggggccagaagagaacggggggagatgggaacaaaacctcctgtctttattaagctgatattatcatcttaaagtttctgtcttcaaaattaccctggaagactgcaattagatatgttcaaagaggccaagctaaaggtagaggaagaccctcactgaaccatgtggacaccttgcctctgactgtctcctcatccatacggccattacatagtagctccagcttctgctaactcaagggtcactcactgatcaaccatatttgggggattacaatcctccttttggtgagagaaagtgtaaatctcttctcctagtttgagacctgccctcctcttcgttttgggacctgacatgagctggtcataaaagaaaaaaccagaaccaaaaaacagtgtcttctaattccaactcgtttccccttgagttcctaatggttggggtatttattaaataagtacagcctgatggagggacagccagacctaccattcaggttgtagaattctagaaatgtggaactcagggactcttccaaagaaattctgtcctgcctaaatcaggtctgaaaggcctctggagaaatggaacaacagcctatgtgtactcactctcttggtctttcattggagtcactcctgggaatccctcaaagatattttctgtccacacactcatgagttccttgaagcagagtaatcttaggtgctcagagaaactccgtagttccttcaccataggagccacttgagatgtgaggtcctctggatcatcagggttggcaaaagcacgcagcagaactccagggaaactgctggcatttggtttgtgctgtcagatcaatcctaggatttcaacatcagaaatacccattattgtcctctctgaaatctgtgggcattagccctggtgcctcatgtaaaagttagccttctggtttccaaaccaattctcttcgtggtagactcttcatgaccaagaattgggacttcccagctctcatgttaccaagtccagttctccaagatggttcctgggaatgcttcttcacgtctgagtaccttgtcctgagcatgtttcataaatgggtaaaatgtgtgattgatgtctcttttattttattgaaagcttgttttcttctgtagcagttctgaaatttcaagatgttcttcattactttgttttaattgccatgtgacaaatatttcaagaaacacccagctattttaaaatttttgacagacttcatgatggaaagacatacacacagccctacttgtttaataaatactccaaccattaggaactctaagggaaagaagttggtaattatttaatgaaccttctgtgtagtcactttcacataaagtatagctaaggactcagaagcagccttttacttcagccctgaaattactactattagtaatttaaaatcacttttcctaatgtgcctagcagtctcatttacctataccacaggtcctcaaataacattgttttgttcaacactgtttcactataaattgatgaggaaaaaaaattgatttccagctggggtcactatctgtgtagaatttgcactttcttcccatgtctgtgtgggttttccccagggactctgttttcccccacatcccagggatatgcatgttagatgagttggcgtgtctacagagtcccagtctgaatgagcatgggtttgtgtgtgagtgcgccctgtaatgggatgacatcctggctagggttggtaaccacctttcaccctgagctgctgagacaggccatggccaaccaaagcactgaactggaagaagtaggtaaataaatatcttacttgtttttattaatctttcttaaatgcatacatagttcacatttatttcaatgattaatattagaagttctttggtcgttatttagaagtttggtgatgtttttgtggccagaaatacatcataggaatttaactcttgtttctatcaattagcctatggtagaattggtttaactagaaatcattttgcttaaagttgtagtttttaagaacctaccaatgacattaactgaggacttactgtaattgtccaagaattatagcctttgaattcattcctggatgagagaaaagatatttctatgatatatactcctatttaagaaatcaggggttttccaaagaaagaaaatatcagtgcttctctgtatgagcccactgtatcaagaaaagatggacccacagaggttgaaccaaaactcttgcagatgcaataggcacaggctctctgtttcccgttgtttttctaggtctaatgaaaatgtgaagactgagggcttggcctcaccctggtaatatgatcaagaacggaactgtggtagtaaaaatgagaatgttagaagaatcattatattcagggaaaagaaaggcctcaaaagggaagattactctgaataattcatgctccttttctcttttttcctgtgtgaaattcagtgtttcctttataattttttgagaagaaggctatgctcaggatctttagaagctggtggtaacttcacaatcactggctccatcaggcaacgagagacttgctgaaggagaaacaaactgtgaaggtaaagaattctacccagaatggcaactctgtgtgctttaagaatgaatccaagttttggaagttgtgggaatgtgttcagtcgaaacttttcaattgcttgcactggggaaaccaccctcatcactaggcctggggattatgaaccaaaaccaaggactccagtctctgagtcagggcgagtgccttgggagggaggatgaagggaactgggctcagtgcctctcctaaaatacctttcccctcctagaggtcaggtctggcagggtttaatgactcaattcgtgtgctgagtggcatcttggtagctccggggaagtagtcaacaccacccaacacaaactgggattggaggttaggtggggtgactatgagctggacacctaagaggttatcttcttggagaggtcaaagaaagcttttgccaaacctgttagatgagtcaacagatagagacttccatctctgctttcgttcatcctaattttttaatagcaccaaatgtgtagaaaatccagaaatgaattatctgatgttgtatatttataacagatgttagatggttggttgattagtgttagctatttccaatgcatgggttgcctctgacataagtattgaattaaatcaaaaatatgtttatatatacctactatgtacccaaaaaaattaaaactaaaagtaaaaatataaaatattttgagtaagcagcatagcaagaccctgtttcaacaaaaaaaaaatcagccagatgtggtggtgcacatctgtagttctagctactcaggaggcgaggcaggaggatcgcttgcgcctaggagttcaaggctgtagtaagctatgatcacactgctgcattatgcctgagtgaaagagtgagacctcatgtctttacaaaaagttttcttttttagtcaaaatattctttcaaaaggatctagttaaaggttaattttctggcatacaaagctagcagaccaaatgggttcaaaactttaaatagcataattcatccaggaagaccattcctttttattttttcctgtgcctttatctgcaaagctctaaaatggccttcaggaataaggcaaggtagctaatatttttcaagcaaattcaagagcaagatagaaatgaaatgatcccatcttatcttttccttcctccgatacctctgcagtctgaccctagggaatgagtgctatgcggatcagatcaagagaggtgatttgtttactacttctgaagaccctaaaacttttgctaaccctaaaagtgacctaacctcttgggaagggaggggcattcagtctcgaatgacacagaccaaccaagaactcctacggaccagtaagcccttaaccgtgtagataccgaagtgagctttggggagagagagaatcgctatcccccagacatggtaaggcagtccccttgaggcagtcacaagtcaactgctcaatctttggctagtgtccctcagtagactagctctagttataaggggatgttctaaataaccccaatggaacaatccacagccacttactgagtacctaataaacccatgtatcactccctgctacctactgttgaggtagatagcctctgaagagcctctggattcacaaaagccaccctgaaatgaatatttctccaaaaagtgcttggggtttcttccacatccccacatcccagctcccttccctttcatgcccacagcaaggtctattgctgcaaattggtggtgaggcaagttggctgggaggtgcacctacacgggggagttctattgtttttataaccagtgccagctctgagtgcgtggtgagtaagagcctcttcctcttccctctgggctgccctcctctcccatgccaatctcattgctggcctgttgtggatatggtggtaagcaagggcggctgcctggctctgatgcttcccagacttgggacccaaaactcaagaagacaacgaaacatgtaagtgagggcttcatgggcctgtgtttcctattagccagtattcctgggtaaagttttctggggagaaggggcaaatgtgaagacaccactacagcgttactcttccttcccccgttaagtaaatgggaagttcttacttggcacacaagaataaaatgaatgttgactgcctcttccagtcacctttgggctgattttaggttagacgacgttttccctaaaggaatcttatttctgcaaacttcttttttaaaactcaaaataatgtctgcttgttcacttttatgttagaaagttataatacgagagtaattatggttactcttgtaaccataattttgcttatacattggttttgctattttcctttctgaatggtgtttattttagattttagctcctctcttgtgttatgttgctaacatttttgtcagctgccagattattacaagcagataaagggggagttttcttctaaagagacccccatagttcacgctcaaagaatttgttttgtataccctgtgagggggtgagggaaataattcattggtgtctttgtgtgtgtgtctacgtgtgtcgttagctgtaatctgcaaagatttctgcatctttaagcataaagatcgctttctcattttgtaacatgatttcttttcaaacttgtcatgtaattgaatccagctttgagtgacactttaaaatatgctctcccgcgtcagaagtgcttctttaagccaggtgctcttcacgctcacctgctggcgtgtttgattagcagccagccacagccaggtgccaaatccattctaaatatgggagcctgtgcttgagaagactagtcatactaattattcagacctcctccttggaagtaatgtggcaaaatcacagaagcagaaaagccagaaacagtatgagacttgctattgagggaccataaaatcagaattttgcctcataatattgttttgttcttgggtacatcctttccagctatgagctcaccagcccttgctctgtctctgagctggttggcatcattgccgttctacagatggagaatgggagatacagctgtgcaagccaaaatgcccaaaagccggatgatctcactgaaactgggagccagcaccccaggtgtctctctagctccttgctgctggtgaatctgcagcttaaaaaaggagagctgcaggctaagttggaaccacctagagttgcctgcaagcaatctgtatttgaattgcctgtcagaggccaggtgaaaccaagcagtgggtcaaaccaaaggggctgcatgcatacataaatgggaagaaggttaaaagtgaggaaatgggggatcgaagtccaggaatgtagggaatatgctggaatatcctttttatgcaggccatccctcttttaactgtgggctgaaatatactggatagtatctgttgtaccgaaagtacaatgtcacactggtaggaaatatttaaagtaaagccaatgtattaatttaaatcattaatgcaggaaatatttattgaggctttcccatgagccaagtcccataatattcagctttgtaacttgagtgcctatcattcagtggatggacaggaaggatgccttgatgaatggataaacacatattgttcatgagattttagtttaaggactctccatcttctccctgctcatcctcccttgggacagcccattcaatcccacagagacacctgtttcacccctcccagaaccacccacccacaggaaggagaatttccttaatgaaggcaagtaaacacaggcctgtatgcccataggaaggaagcctttgtgtacttttacccagattgaatcagggaaaaccatgtcaggaagaagggcacaccctagccgatgcacggaagtaacatttgcatgtcacaggcttcaacccagcaatccaacacacaggtgcgtaatctctgggccaggcaaccagagcaaatttaccttcatggtcttcggagctccaccttccttcattcatcatctcttgagcttgcttctgaaggtcctagcttcatcttggacataagcagccaggatctaggaaaggctcaccaaacaccattatttattgaatgccctcaatgcattggcctcaaaccaaatgcagaattagattactgtccccgaccagttggttcacattttaaacaaataaataggcaggtagaggtgaactaaatagaaaggaagatggaaatatactccagggagaggcaggtgctggggaggggaaaccggtcagagcctgtcatttttagagcttaagtaggacaggatctcaaaatatttcagatccagctccatgtttttgatcagccaggaaggcaaatttggttgagagcaggaaagatgagacacacacttcatgccctcaatgttggctcattctttcctgattgtttctatctttgggcccctattgtgtcttatatgtgcttctgatataggatatggccaatgtactttgttacaaagtaacaaagcaattatttgtttactccctatctcttctaatggatcatgagctcagtgagggcaaggactctttgtcttcctcatttctaaatgtctaaagcctgatcaataaatgcttattgaatatacatatgacaccctcaacccccaaagccatgtaacagggtaaggatgactgcgattgggtctcaaattagaacaagggccaggatttgaggtgttcaaggaattcaaaatagacgtgattggatttgaatggttgacagctttcttgaatatgcagtatgacgccactgggattttgagatgatgggattaagcaggttgggaggaggccagtcactggaggcaaaggctcaggattaggaatgctcttgtggttcttggggaatagtgaatggaccatagtggcaggatgaggccaatgtgtgaagggacaaacaaagttgtttgaaatttaaacttttggcaatgggaaaccactgaagccatttaagccgaactgtaaagagataaaaggaaaattcaaaagaactgaatctaggtaataggttagagcatgaggtgccaggaacaagggctctatgaaggaatggaagccaatacccatgagtgtgtgacaaaatgctgatctgggtgggggaggagggtagtgggaataaatgttaggattctggagtatttgtgggggaggggagatttgagattaatgtatcatttgtatccagagttttctctctaaatgaggttaaaagaatgggccaggagcaatggctcatgcctgtaatcccagcactttgggaggccgaggcgggcagatcacctgaggtagggagttcaagaccagcctgaccaacatgaagaaacccccatctctattagaaatacaaaagtagccggccgtagtggtgcatgcctttaatcccagctactcgggattacagtagctgaggcaggagaattgcttgaacctgggagatggagcttgtggtgagccgaaattgcaccattgtactccatcgtgccattttttgagatgctgtctcaaaaaaaaaaaaaaaaaaagaatgatggctaaactctttattaggtgtttgttaaatgccagtcactgttctaggcattttacaaacagtagctcaattcatcctcagaacacccctttgtagtattattattggccccacttgacagataaactgaggcacagagcaattaaagcacttgcccaaggtcatacagttataagacagagagacaggattcagaccaggatgtaagtctgccaaggcccaaatattaaccacaaatgcctgcttcagcaggttcatgggaagatttaaggtatgatgaaaggggttctaaacagtgatgtttgttatcattttgaaaggagaccagagaagcatttcctgcatccattttcctatcatcgttaattgcctactcacacacagtttaaggttatcagtatatagtaaaatttaaaatctgtaataggataatgtttcttattttgccttttaaacactgatttttctcatttaaaaattagtatttgttataaaaattcaaatcttacagaaataacagatatacagtgaatatcccatgaaatcttaattatcctcctacccccaaatcattatttactgttgggtagaaattcctccagctcttttcttttttttaatctgagacggagttttgctcttgttgcccaggctggagcgtaatggcacgttctcagctcactgcaacctcgatttcctgggttcaagccattctcctgcctcggcctccaaagtagctggtattacaggcatgtgccaccacgcctggctaattttgtatttttagtagagacagggtttcaccatgttggtcaggctggtctcaaactcctgacctcaggtgatctgccctcctcggcctcccaaagtgctgggattataggcatgagccaccacacccagcccacctcttttcttttatatatataggctgctgtattaccatcatttatgtcaatagtaatccttttttccaaaaggtgatcatactgttttgtaacatgctttttctttttcttttttttttttttggcagagtttttgctcttgttgcccaggctggagtgcaatggcatcatctcagcttaccacaacctctctcccggattcaagcaattctcctgcctcagcctcccgagtagctgggataacaggcatgcgccaccatgtctggctaattttttgtatttttagtagagatagggtttctctatgttggtcaggctgttctcgaactcctgacctcaggtgatccgcccacctcggcctaccgtaacaagctttttaatttaataaataggacagctttccatgtcaggacatacggggttttttttttttaacttttatttttaattgaaacataataattacatatatttaagggatacaatgtgatgatttgatacatgtatacattgtgtaataatcaaatcagggtaattagcaaggatatacacttttatattatttcctttaaaagttatataggattcactttcactttcagcatcatttcatctggattcacgttcttttgcaattaccagagcaacatatctgatgtgacctagattcttacctcaatgccatttttgttccttttgtgtcttggacaggacttaaggagaagcaagttcaaatggggttcagttttctgtttctgtgaaaacaagaaaagctagtacttatgtagtacttatgtagcacttatgagccagcaactattcctagctccattgtacagataaggagactgaggcctagagagattaagtaatttacttgctcaaggtcatacagttagaaagtcagaacttgaaccctggctctttgactccaaagcctgtatatttacaccacactgtctctttatctcttttacaagtcttttacctaaactaattaatatgaagtggcttccatagcattatgcagtcaaccatggtgtaaaagtcaataaagataagccctaccacttatctctgtggctcaactagcagcagaaagcagggagttgtctgaaggagcagcttcatttcggctgtttctctctccagcctctccccaccggtcactgttagcctcgagtttgaccctcaacatccccagaggatgcctcctaggactcgaacctcatttagtgtctctactgctgatggacgccatgagtggagctgtcgaccaccttgggtgaagtggtggtctccacgtcccacctgggcagcacgatggccacagaaaggttgtatctaccccacccagcacaacacatgcagaaatttcaaaagagcctatttaagtagatgagcatagatagataattctgggagaacatccttaaaaggagtttggttttttgtttgctttgtgtgggtttttgtctaaataaactagactgctttaatatactgcctcttttaatgaaataaagtaattgtttccttagctgtgtgctaggaaagccaatacaaagacatataagaaaaaccccacagacctagattcttaaaaccattcatatttgatcccattctcaagatatctcattatatacatgcaaatagtccaaaatctggaaaaatcccaaatccaaaacacttcttcttccaagaatttcagataagggttacttagcctgcctcatactccccaaaataggcatcttcatagaacttcagggtgagaaggggaccgaagatttaagaagttccatttcttctctgatacattttccaacagtcccccaaagtgggcaactagcttccatctgaacacagtcaaggaaagtgaactcactaagtaggaaagcagactatttcattttcagaacccgttgagggagggggaagggatagcattaggagatatacctaatgtaaacgatgagttaacgggtgcagcacaccaacatggcacatgtatacatatgtaacaaacctgcatgttgtgcacatgtaccctagaacttaaagtataataaataaatatatatatatatatatatataaaattaaaaaaaagaacctgttgaattgcaacagtgttcttctttatggtaactccatatctgctgtcccaaaacttcaattctttcatccttcttagaccaaacagaaaacatcgaatagtttttatactttaccaccttccaatctttaagaatagtcaccatttccttgccaaattgtttcttttccaggttaaggtctttaattcaatcttcacctattattcccatgtcatgatctagcattttggactgttaaggtccctcttctttgatatgccctaaattgtccatgttgctctcagactgtgacatttatcacataacacggtacttcagggaagactagataaggacagccacttaccttgctcttgatggtctacttctattagatgtgctaagcttaagatttcatccaattctttaaaagcaggggaaattaaggaactttattctggaaagtttgtaaagaaatcaaccagtcatggaatggcaattatgaaaagcacaaaaaataacacatgttggtaagtatgcagagaaaaggcaactcttatacactgttggtgggagcgtaaattagtccagccactgtggaaaatagtatggcaatttctcgaaaaactgaaaatagaactaccctttgagccagcaatcccactactgggtatctatccaaaggaaaagaaatcagtatatcaaagggatacctgcactcacattttgagcgctattcacaatagcaagatatggaatcctaagtgttcatcagcgggcaaaaggataaagaaaatgtatatacacatagtggaatactatttggccataaaaaagaatgaaatcatgtcatttgcagcaacatgggtggaactagaggttcttaacgttaagtgaaataagccaggtagagaaagacaaatatcatcgtatgttttcactcatatgtgggggctaaaaaagttgatcccagggaggtagagagtcgagtgttagatattaaaggctgggaagggtaagtgggtgagtggtggtgatgaagagatgttggttaatgggtacaaacttacagttaaaggaatacgctctaatgttcgacagcagagtggggtgactatagttcaaaacaatgtattgtgtatttcacagtagctagaaaagagacttgaaaaactcccaacacgtagaaatgatgaatactccaggtgatagataccgtaaatactccaacttaatcattacacattctatgcatgtaacaaaatatcacatgtatcccataactatgtacatatattatgtattaataaaaataaatagaaatcaactggtcaatttatttttcttcaaacaataatacaggaagccaggcagagtggatcatacctgtaatcccagcactttgagaggccaaggcaggcagatcgcttgagcccaggaattcaagaccagcctgggcaacatggtgaaaccccatctctacagaaaaatacaaaaattagctggatgtggtgatgtgcacctgtagtcctagctacttggaaggctgaggtgggaggattgcttgagccctggaggttgagtctgtggtgagcagtgatcatgtacaagctgcaccccagcctgggagacacagctagactctgtctcaaataataataataatacagaaaaaaactatggacctagatattttattttatgtatcgtagtatctttcttacatatcagtttttataataatatttatccatgataccatctgtaagacaggaattgtgtaaaaataacaatgctggctatgcacagtgactcatacctgtggtcccagcactttgggaggctaagacaggaggctcacttgagaccaggagttcaagaccaccctgagcaacatagtgagaccctgtctctgcaaaaaattaaaaaattacccaggcatggtggtgcgtacctgtggtcccagccactaaggaggctgggatgggaggattgcttgagtccaggaagctgaggctgcaatgaactatgagtgcaccactgcactctagccttggtgacagagtgatatcttatctttaaaaaaagaaagaaagaaaaacaaaaaaccaatgcttaacttttcataagtgtctgagtaacaatccctgtggtaccaaatattgtggcctgttgaaagtaagagatgaactattgtagagtatttctttatgccagtgattctttgaaatggatggctaggctgttaaagacctgcatttttttttttagcagcctcctcctcggcccaccctttactgccatcttgatggagtcatgtttatatgaatttgttcagatcgctttgaaagagctcactacttccctcctccactgaggatttaggtacccactccagatccagattcggttttgtatcactagaaaaaatgtaatagagtagatctatctgaaaaggctttctttgattagaaactgtgaccatgtagatgtaagatttgattataactttagacttaactggagaagttattgctagaatatacaaggcaacatgtggtggtggatatatgaaggtggaaaaatacattagatgtccttatatcattttctaaaaagcatatgatggggggagctgtataggagagtatcacagaaaattatcacatataggaaactatcgtcaaaattaacagtgtccctcagccattgattaaataaaaaaaggaggacaaaattttttaagacaaatgaactttaaataaaggccactaattatagcagagaatgtgttggataagagtaggtatatgtaattatatagtaattatgctgaaaatgtaatcacatgccaccggctagctagttaaccattttgctgggggatgaatccacccccagcaaccatctccttctgatctcagagacccacattgactttgttagaatgtgtgatatggtttcttcttagaagggtgaccttttcctggccaattaaaaggtgctgctttgaggatattggaacccatactcaaagggataaaaggaaattgaaacttctattaaaaggagctaatgatgcctggagcagtggggattaaaaaagaacaaagtcagtcttaaaaagatcccccaaatcaaagagctgcttctctcatcaaataccagaagaaagcaaaatgatttttaatgaaaagtggggcaatggattcagccttttccctggatcctagggcttcaatcaaaaccagtgagtagttttaagcaaaattctttgaacatttgggataattatgctacataaatttgacatggtgttgtaaaaggtaaactagcttttcttccaaattagagaaataataaagacaaatatcagaaggataactctaaaaaatcatacagataagagtgctttataactgattccccatctgatacaaaataattcctgggttaaaatctagcattttgatgataaaagtataggaaatcactgtcaaaattgtcctgtggtggacaattgttaggtgattgctgtgattgtaattagcacaaccttggtaggttgtacattccttaatacactttcttatcaccatctgcattagtctacttgggcagccataacaaaataccacagaccatgtggcttaagcaacagaaatgtatttttgacagctctggtggctgtaaagtccaagatcaaggtgcttgcagaattcaatttctggtgagggcattcttcctggctcgcaggtggcttccttctccttatgtccttacatagcttttcctaggtggatgtgcttggagagagtttaaaaatgagctctccaatgtctctacttataatgatattaatcctatctgatcagggccctacctttaagaccttatctccaaatacggccacagtgaaagttagggcttcaacatgagaatttggggagtacataaacatttagtccagcaactcaaaactacaatgagatatctcacccaagttaaaatggctcatattcaaaagacaggcaatgacaaatgctggtgagagtgtagagaaaagggaaccctcatacactgttaatgggaatgtaaattagcacaaccactatggagaacagtttggagctttctcaacaaactaaaaagagatctactatacaatctagcaatcccactgcagggtatatacctcaaagagaggaaatcagtgtatcaaagaggtatctgcacttctgtgtttgttgcaacattcttttttttaagtatatttatttatttatttatttatttatttatttatttatttatttgatggagtcttgctctgtcacccaggctggagtgcagcggtacgatctcagctcactgcaacctctgctgcccgggttcaagcgattctcctgcctcagcctcccaagtagctgggattacaggcgtatgccaccacgcccagctaatttttgtgtttttagtagagatggggtttcagcaacttggccaggctgatcttgaactcctgacctcgtgatccacccatctcagtctcccaaagtgctgggattataggcatgagccactgcgctggcctcaatattctttacaatagctaagatttggaagcaacttaaatgtccatcaacagatgaatggataaagaaaatgtggtacttatacacaatggagtactatttagccatgaaaaagaatagaaccagtcatttgcaacaacatggatggaactggagatcactatgttaagaaataagccaggcacagaaagacaaacattgcatgttctcacttatttgtgggatttaaaaatcgaaacaattgagctcataaacatagagagtagaaggatgttaccataggctgggaagggtagtggtgggctgggtggggaggtaaggatggttaatgggtaaaaacaaaatggaaagaataaataagacctactatttgaaagcacaacagggtgactatagtcaataataacttaatcgtgtattttaaaatcacctaaagagtgtaattggattatttgtaattcaaaggaaagatgcttgagggggatggataccccattctccatgatgtagttatttcacattgcatgtctgtattaacacatctcatgtaacccataaatatatatatatatatatatatatatatatatatatatatatatacctactatgtacccacaaaaaatgaaagtaaaagtatgatttttaaaaaaccacttagtccataccaccatccaacaataagcaagaagccagggaatctctgggcttgtcaagtagctgggtttcctgccacacttggatatcaatggctaatgtctttaccacttaaagaatagttgggagagtggctggcaagcagtcaggaaacctaaaagccagctagtgctgcattttctatttgtttaaattataaatgaattaattgtccaagccaaagagcataaccagtagaagcctcctccttacaaatttgcttgaactcccaaaagatatgtttaatggcaatgtaaccaatcgggaaattctttgtcataaaccatcagttttgaatatgagtcatctatacagcaaatcggggtattggcaaaggaagcttcacaatgtccagctttactgcccctgcacttcagcctgccatggttttaatggtggctaaaatcattattttacaattgaaaatcttttctagaaagctggtcattcctatttatacttggactcaaagctacctaaggggcccaggatgcctcatctcagcttggaaattctagaattaattatgtgttctaggatgaattaagtgttcaattcaattccaaaaaaggacacaaccatttctgtgctcatatgtattaggctgaggcaaacttacctggtgttggcagttggttttggcagtttaataatttgagctagataaagaaaaaggaggttgttgagacaagaaagatggctcttctcaaaagtaaaagacatctggactgataagaaggcaactgagagagaagctaaagataaccaagagaaactgatcataaatttgcctcaaggttcagacagggggtcatgcagttgaattataggcaggggtcatggtggcggctttagaacttgtgtcctgattctgatgtctctaggcagcctctgtcatgcacccatctccaaacattgggaggttgaatatgcatgtatgaaaagaattgcccagtataaacatgtattataggttacacatagctgatgggactatgaagtccctgagaagtagctcagcctgtgtcccatatcacaggctcctgccttaactgtgctatgtcgaatggccaataaaactcatgcaacagcataaaagttttaatttttacatttccttatgatcccagggagaccaggccttcctggagagggtattccaggttatgagttcatgcaaagtaagagatgtaagagatacacttgagtctccctctctctctctctctctgtgatgtatgtgtgtggtgtgtataagtgtgtgtgtgtatatatatacatatacacacacatatataaaacatataatatataactcaaaaaatattagctggtgagctaatatatgtttaccctcacgatccaggcattctacttggttgttgagggatgtagacctggagcagatatatcatggtgtggtgagacaagagatgggaggagagggccatgcatcatattccattgatcctcagtaggacttttgctatatttacagtctaacttcaaagctagaactgatctcccttaagtctgaggctatgaaatgagctcatattatgaagaattgctcagtaaacttaaagaagtataccatacaattatatggtttatatcaagtatgatgatcatttctgccacttgtaccactaagcggtcagggttaggaatcctatattgaattcttccatgtgccagaccttgttctagatcaggatttttcagccttggtgctgttactgtttggggttggatagttctttgttgttgggtctgccctggccattgaaggatgcttagtagcatccctggcctttacccaataaatggtagaagcatagcaccttcccccaattgtgacaacccaggtgtctccagacattgcaggatgtcctctgggagcaaaattgcccctggttgagaaccagcattctagatacatgacatatggtatgacatgtggtatatgcaaaaagcatgaactgcagagtcacattcttgtcttcatttcttcattcattttatttaactaattaatttttttgagacagagtctcactttgtcactcaggctggagtacagtggcaccatctcagctcactgcaacctccgcctcctgggctcgaaggatcctcccacctcagccttctgagtagctgggactacagggccatgccaccacacctggctaatttttgtattttcagtagggacgaggtttttccatgttgcacaggctggtctcagactcccagactcaagtgatctgcccacctcagcttcccaaagtgctgggcctatggcttagctgagccaccatgctcagctcgttcattttatttattgagcctttgcaacatgccatgaactgtgctaggttatggggatacaaagatgagtaaggcatggtttttgccttaaatagaagactctagtaatggagaaaaactcatatatagataaattaccaatcaatgtggtaaatgtaacaaaatagacatgataacaggcttgggtagagagttcctaacccagctgggcagtagaagctggaggcgtcaagaaaagctttctcgagttgtctggcctgaactgagtcttagataagtgggtagaggaggtgaggacactgaagcagaggcataattcagtgttgcagttaacgtcgaagtgtaagataagacacaggtgaaaaagcctggtgtgtgttgagtgttgggaagggaacgttaaaagtctgccgaggtagacaggtgaccttgtctggcattctgagagtttgtactttattctaagaggtggggagccattgagagccttcaagtaaggaagtgacatgtttttgtttaaaccagttgttttggcaacctctactggctggactcaagggatcctcccacctcagcctcccaagtagctgggactacaggtgtgtgccaacatgcccagctaatttttgtattttttttgtagagatggggtttcaccatgttgcccaggctgccatgcagaaaatggattaaaggagcacaagagtgaaagcagggagacaatttagatttgccaagaggtgatgagggcttgacctagggcaatgggaaataggggacaggatttgggaaatattttggagataaaacagtatgatttagtgactcttttgatacaggagatgaggaggagggggagggttcaaggatgattgcctctcacagttggggtgccaccatcattgcctatcctataggaaatatatagtgatggtaattattgtattatgctattatattaacttattatcctcagtttgcaaatgataaaattaaggctcaaaggagaaagttgcttagcccaaagtcacacagctattgagtagagaagccaggatttgagatctatttgactatctgacttccagcctatcatactatgtggctctggctaagtatggattaaagtggtgaaaatgaatcattcagaaagtagtcagcttggttactgctggcctttatgcttggccagtgctcagtatttgttgaagaaaggaatgattttaatgaaaattatactaatatatttacatatcattttcatgtatttcaaattagaatgcatgaggggaaaaataaatagcttatccaatattatatgcaaatatcccccacctgagctgcagctttagtctcttctcaggttcctgcagctacaagtgaagtcctgaggtcccctagtccattgttctgcctctttgtttaatcactcaccatgttctctttagacacagtgctaaggacacaggtatagcaaatacttgttaaatgattcagtcatttatacatttttagcatcaccattacattctgggccaataagaggaccttcagtcctattgtcatttctatccaaaaatattaaatgtgaccacgaccaagaaagactgttgggcaggaaaaaagggaaaaatgtcactgggctaaaagtggaaagttatggatattgttaagataaacacaaagaaattcctgtgttcttttctctagggttgctcacttaacctttccgtctccaagtccagacttcaaagctccaagaaaaaacaagatacaacactgtaggattagctgcccaatttacttatattttaagaaagtgtccaaaaaggccagttaagcctgtctgacagcagtgacaggtctcatcgtcagaaatttcaagaatgattatagcctgtgacctgtgatggctccaaaggccataggaattgccaggggatgtcactggcatttatctctcaggatcaccttccttctctctgctgggggagtcagttctggacctggatggaaaaggattcccagtacccagttacatagctgcttacatctgttatctgtgcatgtgaggttttatactagaccggaaaatagagagacagtcacagttttgtattcatgaaattagagactcgtggagaccattctgctgtggcctgttcttaccctgctgtatcagagattccttggtctggagtcagggactcaggcatggtgagggcgccaggagagctggcagggagttcctcatttcttattcctgctgctcctgcttcatttccaactataaggaaactcatggaagtatttttagtgtatttgtggtaccagagcccctcaccattcccaagacaaggcttgactttccatcccatagtataagcagagtcttgtactacggttcctcttaggaattactgctgggcagtaggttattaatagtaacagttcacacccagtccaatttaaaagaaacagattgttcctttaaaaaatcttctctgaatttaaattacaggtatttataatatttctccacttcttacctagacactggatattcctccaggttaaatgcccttggactatatttttctttgcctgctggattttattcactctttatatctcagtgtcataggccctttctaaccctcactgagttgcatggcacctggaaaaagcccttcttactcgactgtaatataattgtccatgaaagacctcaacatttctttgggagcagagatggtttgcatttattgtagtatctccaataaggcacatgcagtgggatgtcaaagaaggcttgaactgaataggagcacatcctaacttgcaggccagtagacgtggatctgtaccaatgtctgtctcttaccagctgcataatggaaacattacttactcttgctgaacccacatgaaaaatggaaataatcatcttaccttcaagagttgtgaaaaatcaaacaagttcctggcagaaagtaggtgctgaataaatacacatattcaccaggcacagttgctcatgcctgtaatcccagcactttgggaggctgaggtgggtggatcacctgaggtcaggagttcgagaccagcctggccgacatagtgaaaccaccatctctactactaaaaatacaaaaaattagatgggcgtggtggcaggtgcctgtaatcccagctactcagagggctgaggcaggagaattgcttgaacccaagagatgaaggttgcagtgagccgagatcatgccattgaactccagcctgggcaacaagagcgaaactctctctctctctctctctcgctctctctctctctatatatatatatacacatattcatttgatcattatactaggttgaggatttaagttctttccaaaacatttatgtaaggccgttgatagatggtgagaagtcttaatctaagtatcaacgtattttctaaaataattttgaacattgtgagaggcagagtgaaagaaacacagtatttgaagtcaaaagacttggtttgattcattttgtgacttttcctcctggtaaatgacatatacactcatttatagccattcatgatgttcaaagctatttgccttaacttgtccctgaatatgcctgctcattactagcgctaacatttttaaatggaatatctgttactcatttataattgctttcttttggttcaaagtgtgctctgctctcctaatgttcccaaatagtgagggtgctgctgtttgggggtgggggggtccccttggagtttagattctgtttctgtggtgcaacagtgacatccattgacctgttatgctaattatagaagaaacctgcttctctgctctgtgactgttggattttctgatataaagatacaaagagaacaaactgtctccgggcccaagtaagacaagctagtggtcaacacctggtcccctgcagactgggctggtttcaggacccttcccaaggatacatattctaagatcagtgccagctgggtgttcccttctggtcaagtggagacagtcctagaactggtcctctccatggagttcagcacgttcattgggctgttgggaaaccattggtttgggctccagcataagccagggcaaatcactttgcctctggacttttccacattgataaaatgaagtcgatagcaatacctgctttgtagttaccaaagtgctcttccatgcattttataataacttcccacaatcccacaacaattgtgaaaattaggaaagcacagatcagatctgcttagcatccaccgactgtgaggatgtgaagctgaacaccaaattacagggtttcaaacctcaagccttggtgacttatgtttgctaccttagttggaattaatgaaatcattacagaaattcctgcttcatttctggaagagccctcaggggaggttctaaaaatggaaaatcaaaggaaaggctatgtggctggatgtgagagattgagcaatgagtcagtatctttaagtagaaaaagatttacattgctggtttccatctccataaagaacataacaggaaatagcaagactaaaaatatttatttttgcctagtatgtgtcagatactctgttaagcattaagaatggaggataaactagacaaactgtttcataccatccagaacctcactgtcaagtgagcaatacagagcaggaacagtgaactatatataatagtgtggtaaatgttacatcaagcattcctgcaggatgctacccttccaaaccccctcccatgtgtgtatgtgtgtgtgtgtttgtgtgtgtgtgcacatgcccgcatgtgtgcttggtaggatccaactagtaactaacataggtacctttggatggataaacagatgaatagtgtcaattcaactggaagccaaaacatcaaacatttttcaatatcaaaaccaagcagattgcaaaactgacacatcagatacataccacacacaaaaacaaaacccaaggattcaattgcactttgtgtcatttcatagtaaatctttttttggaaacaattagggaatgtgtaactaatttgtggtggacttagcgaaacccaccactgactcactggtaaagccttttcaaaacactgttatgattaaacaaaccaaaaaaaaaaaggctcatctaaaaatggacctcattcagatcccattcttccttctcggttggtcctctagcatgaaaagcttggttctggtgtcccctctgattaaattgtctcattggaaccctcattgtgaatactcaaggcccatccttcagccacctctcctctccctcaaagcacttcccgatgtgaactgactcttcctcactagagagcctcaagtggatggatcactccctacttacaggtggaactttctgaggacagaagccaacagcagaccccaggcaccttgccaagaggccaggccccatgactgagttctttactcccccaccatctagccatctgggctcctttggaaaaagtacagcccatagtttaaaacattacttttcatattggtcatttgggtttagagccatatgttagacaaactgagattttagcctacagttgttggctctctttgcaattcttatgtatatgtaacaagcaccaaagtatatatcagaaatccagtgaagttgctgtgggctttcagaagcatttatttatttatttatgagctagagtctcactctgttgcccaggctgaagtgctgtggcatgaccttggctcactgcaacctccgcctcccaggttcaagcgattctcctgcctcagtctccaaagtagctgggactacaggtgtgcgccaccacacccagctaatttttgtatttttagtagagatggggttttgccatgttggccaagctggtcttgaactcctgacatcaggtgatccacccttcttggcctcccaaagtgctgggattacaggcgtgagccaccgcacccagcctgagaaaacttttttacaaaacaagaaaagatgggttcattttgactgaagcaacccatctaaaacatgcatatgctgaataaaccaagaatgaagctgcgcaggggtattcccagaggctgtgctcagatgctgggtatcacacggaggccaccagactcgagagtgtgaagctcactgcccctccccacctcacacgcacctctctcacccacgtcagggcactgccacccgcctctgtgcaccccagccccctccagagctcttcttgcttgggaagctccagcaccatcagcatcttcaccattcatcttttagcaatttgcacttgggcatagaataaacccacaaggagccctttgcaggactatctgattaagtgcatagagtgatttgaggtcctctctagaggtctcactgcccaaaaatctttcacccagctgcttagggtcccatatccctctatgaggggctcattcatttgagttaactcttaccctgtctgtttttaaatagctacccctaggagagagtcatcaacacctcagcgataactagtctatcacatattggttgcattattttttatatttattttaattaattttttttaagatggagtcttgctctgttgcctgggctagagtgcagtggagcaatctcggctcactgcaacctccgcctcccagattcaaatgattcgtctgcctcagcctcctgagtagctgggattacaggcacctgccactacacccagctaatttttgtatttttagtagagacggggtttcaccatgttggtcaggctggtctcaaactcctgacctcaggtaatccacctgcctcagcctcccaaagtgctgggattatagacatgagccactgtgcctggcctgatgaatcattttttttcatttgtgggtggttattttgttttttgagacacagtctcactctgtcacccaggctgaagtgcaggagcacaatcatagctcactgcagccctgaactggtctcaagtaatcctcccaccctagcttcctgagtaaatgggactaccggcatgtaccaccatgccggcttaattttttatgttttgtaaagacagtgtctcactgttacccaagcttgtcttgaactcctggcctcaagtgatcctcctgcctcagcctcccaaagtgctaggattacaggtgtgagccactgtacctggcttaatttgtttttaaagatatttttattgagagataatttatataaaatgtgtgactcttgagtattccagttccatgaatcctgacaaatgtattcacttgtgtaatccacatccctatcaaactataatccattttcttttttttttttctgagacggagtctcgctctgtcgcccaggctggagtgcaatggcgcgatctcggctcacacaagctccacctcctgggttcacgccattctcctgcctcagcctaccaagtagctgggaatacaagcgcccgccaccacgcctggctaatttttttgtatttttagtagagacggggtttcaccacgttagccaggatggtctcgatctcctgacctcatgatccgcccacctcggcctcccaaagcgctgggtgggattacaggcgtgagacactgcgcctggcaaatatagtccatttttatcaccagataaagtttctttgtgcccctttccagtccgctctgcacctccaggcacctactgttctgatttatttcaccatagattagttttttctatcctagaaattcgttaaatgaaataacacagtatataatcttttttgttgatatttgtcactcaatgtaaggtttctgaactttatctgtgttgttgcttgtattaatagttcattgtttatccattctcctactgatggacatttggattgtgtctagtttggggctattatgaataaagctgctacagatattactgtacaagtatttttgtagacatgtgttttcatttttcttgggtaaatacctaagagtaaaatgctacctcataaggtggatgtgtgttcgattttccatacccttttccaaagtgtggtaccattttgttccataaccttcccaacatgtggtactggcagttgtgttagttttctattgctgcataagaaactattacaaatgaagtgtcttgaagcagcacttatttattagctcacaatactctaggtcacggctgtgcatggcatcattgggttctctacctaagacctcacaaagctgaaatcaaggtgtagactgagctgggctcttatctggaggctctaggggattctacttcgaagttccttcttgttgttggttgaattcagctccttcttgttgttgtttgaattcagtttcttgtggttgtaggatgaagtccccatttccttaatggctctcacccagagctgctctctctgctcccagaggcagcctgcatttcttctcacatggaaccccacacacccatcttcaagcctgcaagacgcattgaatccccctcgtgctttgaatctctctgccttcctcttctactgccaggcagagaataaaaactctgctttttaaaagactcacctgcctgggccaaacctacctggataatctcctgtatcttaagattcattgacttgggacttcaattgcatctgcaatttcccttcacaatcgatgtttgaataactaggggacaggaatcttgggacatcttcagaattctgcctaccatagcagtccatgatgaagtcctaaaatcaggatcacttttcattatccagttgcttaagaatccacgtatactttccttctaaagaagcatgcctactgtaggttcaataattgcaatcctgtggttcgagctacttgagaggctgaggcaggaagattgcttgagcctaggagttcgaggctgcagtaggctgtgattgcgacagtgtgctccagcctgggcaacaaagcaagaccctatctgagggagagggagagagagaggtagagggagagggagaggaagggagagggagagggagggagagagggagagagggagagagagagattcacagagttggttactgagagccatgtctctagattcctagcctagaacattgtctactacactctaatcacttcttgcttctagacagagtctgatcctataaggggactttgcggtttggtaatttaaatcaccataaaagtctctggaaatctagaaaacatttattgaaaatcatgcatagatagttccaaatcaaaatttttaaactggctaaatctattccaagaaaagttatactttgtcagcttgaaaccaactgggtagggaaggagccattgggtctggcatgttcatgcctaggtgttaagatcttaggatttctcggttgtgtgtttgaaatctcactcaacccggggaccctgcatatctccctaatagagaataagtaatcataggcctggcattcaagatactctcataagccttttatttttcaagatagattccagagaagttggttgtgaagctacacaacttgctaagtcaaggctagaatccaggtctccctgttgctatacaccagaggtaataaccagcagcaaagaagcccaatctctcgtgaagctgtgctttgtttggcccatagattgttgttgttcttgttgatttagagatggagcctcactatgttgctcaggctgaactcctgggctaaagtgatcctcctccctcagcctcctgggtagctgggattataggtgcacactgctgcgcacagctttggtttttaattggattaatttccaatatttaaaacttggaaaactttacataaacatccagatgtccaggatttttctgaaaagttgggaactcaggtaacagtggacccactttctgcagtgtaacagttgggttagagtggtcctttaaacaggacatgaggccttcagtggccatagttccaactggttcactttccccatttaccctcttggtctctgtaggaacttgagtcatgacacctgcctcaccccaagctgcagttctgagataccttgtctgactattcaaacaatttcttatctggcctatatataccaagtatgtttggctctcatttcctggcagttgaaaataataaaccagattttcaaagtgggtgaactacttgctggctgtaagtctggcgtcattgaaagaatactttctctgtaggcccatagtcatttaccacatgggatcctcctggctgtcagcattcatgtaatttcaaaaagtatccctttccttatgtgctagcttactcctcagaaagttctgactttcagtgaataaaacatctgatatttgtgaagtcaaagagtttgcctagaaaagccactttctcatctaaagagcttactgaacctaacttctttggagaacatctgtgtagccatatgaaattaatgcaggcagttgttaattgatcattcttcttgagtttatgcagccagaatctttcattgattaatagttgtgattctcaatcttagctgcacatgacaatgatcttgacagcttttaaaaataatgatgcctgtgctacaattaaaatagtcgtgatgatgatgatgcctgccattcatccccagaaattctgattcagttggtttgaggttggtcctgggcctctgggtctttatgcttttgttactgttgtatcgttttattgtggcaaacagacacacacatactcacatacattaaatttgtcatcttaaccagttttaagtgtataggtcaataatgttaagtgtatagttcaataagtttaagtatatcaaagttattgtgcaatggagcttgataacttttttatcctgcaaaactgaaactctatacacactaaaaactccatttccctcttccacagcctctggttgcgccttggttttaaaggcttccaggtggtcgagcacggtggcttttgcctgtaatcctagcactttggtaggccgaggtgggcagatcacttgagcccaggagtttgagaccagcctgggcaacacagtgagaccacgtctcaaaaatatatatattaacaaaataaaggcttccaggtgattcagatgtgcctccaaccttgacttggagggaaggattcccacctcaaaggggttctaaggattttacagttcttaccagggtttccacagctgccaataccatctacaaataggtaggatgggttttttgtgtacacagtagtactaggacttctgatgaacttgagtacagttagcctctgcttcaggcctccaactgtggaaccacctccacttggctgcagctttacctatgaagtactcattcatgccatgtggcctggctgggatccatggggtttttttaatctcctatctctctgccatttatagcttgtgtttgatttcttgacccacccttaataccagttgagggtggggcacctgggaaggtgtaccaggaagctgtggcattccaagagttctttggacttggactgtcagaagaaccagtcatctggaagagagcccagatccatatggacttcctgcaccagcagtggtgaaattcaaggctttgcctggagtcctggactgttctatggatttggctgctttttgtcacatctacaataattaaaatggtgttttgtgatgtttgtggctgtttaagcttacctattttattaacttgattcctggcactttcatctgtctctcatgatcccaatagaatagaaacattgccctgttctggtattttccatgagctacctgttgtgttcatctgtggaaaacagttgttttgagaaacagattcaagttgatggagctaggacctggcttgcatcctttttttgtagcataaaattcaaaacctctctctcctgtttactggtatatgtctaatctttctctctgccatcaggcgtgacatcctgaccccacgccataccttcattccctgataagcgctgccctggtaagttccactgcatcagtgctgacctacctgacctggcatactacagaaatctttaagtgcattaggacgttccagctgaacacttttatcacaaaagcaaacaagactgggtcacccttaggacccctatggattactgggaaaaaaagaaaattttatgaggaaaatctggggttaaagtgttgttgacttacggtggtacctctaaaatcctttaaaaaagagtaattttctgcattgtcggtctagggtttaagaaaagtccagtgataccccagtgtcaaagctgcagaaagttctggcctcactcattgcagctggagctttgcagttttaatcttggacttgttcatgtgattacttctattcagatacatcagtggattacagcctgcctggtgtaatcacggctcactgcagcctctacctccaggtctcaaatgatcctcccacctcagtcccctgagtaggtgggactgcaggcatacaccattatgcccaaccaatttttaaattattttttgtagaaacaaagtctcactctgttgccttagctaatctaatcttgaactggtgggctcaaatgatcctccctcctcagcctctcaaagtgctgggattacaggcataagcgatcatgcccggcctgttatgtagtctttataacatttttttaaaaagaggaaatgctaagcaaatagatgttattaaaattgtagtgcaaaccaaaacgagaatgtgggaagatgttataagatgtatgataaagatctttcaattcttatatcttaatttcttaaaaggaaatacagagcaagcagggactcagagctatctgcatacccatgttcatagcagcatcattgatgatagacaaagggtagaggcaacccaagtgtccatggagggaagaataaataaacaaactgtggtataaacatttaatggcctatcattctgccttaaaaaggaatgaaatcctgttacagaatatgacataggtgaactttgggaatgttatgctaagtgaaagaagccagtcacagaaggaaaaatacagtgtaattccacttatacaagttacctagaatagtcaaattcatagaaacagaaagtagaatggtggttggcaggggctggggaatgggaggattggacaattattgttcagtgtgtacaaagtttcagttttacaacttcgtaaaactgaagagtaaaagagttctgagtacaagagtaaaagagttctgagtacaagagtaaaagagttctgtagatgaatgctggtgatggttgcacaacagcatgaatatacttaatgcccctggactgtacacttacatgtggttaagatggttcactttacattatgtaggctgttttttcttttgttttgtttcgttttttttagacaggttctcgctctgtcacccatgctggatgcagtgatgtgatcacggcttactgcagcctcaatctccagggctcaggcgatcctcccacctcagccctgagtagctgggactacaggcatgtgccatcatacccagataatttttaaattattttttgtagaaacaaggtctcactctgttgctggtcttcaactcatgggctcaagcaatccttcctcctcagcctcccaaagtactgggattacaggcatgagccatcatgcccagcctgttatgtattctttacaacaatttgtttaaaggggaaatgctaagcaaatagaagatgttattaaaattgttgcttgggcgcggtggctcacgcctgtaatcccagcactttgggaggctgaggcgggcggatcatgaggtcaggagatcgagaccttcctggccaacacgctgaaaccccgcctctactaaaatacaaaaaaattagctgggcgtggtggcgcccgcctgtagtcctagctactcgggaggctgaagcaggggaatcacttgaacccgggaggcggaggttgcagtgagccaaggtgcgccactgcactccagcctgggcgacagaaggagactccctctcaaaaaaaaaaaaaaaaaaaaaaaaaagttgttctgcaggtgcacgcagggtgcggggagggagcacataatgtcacgccccctctcccttgtccaccgctgcagcctcctcctgcagctcctggtgctgcttgtgtgctccttcggtgaggacctggtacctcttctgtgaagcggcagctgaggagactccggcgctccccatggccggcgaaaagcccaaggaaggagtcaagactgagaacaacgatcatattagtttgaaggtggcggggcaggatagttctgtggtgcagtttgattaaaaggcatatgtcgggcgcggtggctcacacctgtaattctagcactttgggaggctgaggcaggcagatcacctgaggtcaggagttcgagaccagactggccaaaatggtgaaaccccgtctctactaaaaatacaacaacaacaacaaaaattagccggacgtagtggcacatgcctgtaatcctagctactcaggaggctgaggtgggagaattgcttgaaccaaggaggcagaggttgcagtgggctgagattgtgccattgcactccagctggggcgacaacagcaaaactccgcctcaaaacaaacaaacaaacaaacaaacaaatgaaaaaaactaagaggcatacatcacttagtaaactaatgaaagcgtattgtgaatgatagggattgtcaatgaggcagatcagattccgatttgacaggcaacaaatcaatgaaacagacacacctgcacagtttgaaatagaggatgaagatacaattgatgtgttccaacagcagaggggaggtgtctactgagaagggaagctgcttcgttactccaggactgttttcttttcagaccaacatgacattctcagttagaaaactgcaatttggttctaccacattctgactactacagtatagttttctctattatttaatttcccccttccccattcctttattgcacataaagtaactggcatatgtgcacaagcatattgcattttttaactaaacagccaatggtatgttttgattgacatcacatggagacgggatagggaaaaatactgattgtgtgaaaatgccccctttctcctttagtggcatgctcactcagctcttatctttctattctagtaagttattttgcttttactgttttaacaaaacaacaacataaaaatccttgtataccttgttcaattggagaattttaatgtttttcatttatccttgttaaaccaaggacggttttataactcttttgtatgtagctgttacgtgtaggggaatctgtctttaagtagggataaattactctaaaacaaacaaaaaaagtaatcctatggctggactcagtggctcacacctgtaatcctagcagtttgggaggccgaggcaggcagatcacttgaggtcaggagttcaaaaccagcctggccaacatggtaaaaccctgtctctactaaaaattcaaaaagaattagctgggtgtgcctgtaatctcagctactcgggaggctgaggtgggagaatcacttgaacccgggaggtagaggttgcagtgagccgagatcgggccactgcactgctacagagcaaaactctgtctcaaaaaaaaaaaaagaatcctagatacttttctcttcacatatcttgtttaaataaactttttgcttaaaatttaaaaaaaaaataataattgttgtgcaaaccaaaacgagtatgtgggatgttacatgaatttctctttggtcagatttatatagaggtgagactaagtcacagagaattgcttttattatgcctgaggaatgcatcttaaacatgggacatgctgctcaaaaacgggcctaactttgttagatgttttaaggaaactaaggttccacatccatgtgcctacctgccaactgggcacacccacaccatatctcataggcacttgccccagactgaggtaatctttctcatcaaaactgctctctttctagtcttccccatttctgtgaattaggtatcatcactcatcagttgccaagcttgaaatctgggcatcttccttgcccccttcatttttctcacaacctcccacatctaataaaaattaacaaggcctctgtctgtccactgcaagacttttacacaaatgttcaaagcagaattattcatcatagaccaaatgtgggaataatccaagtgttcatcaacttgtaaatagaaaaatgaaatgttgtatttctacacaatagaatactattctacaataaacaggaattaactattgaaacatgctacaacacagacggacctcaaaaacattatgctaagtaaaggaagccagacacaaaagattacatattgtgattcaagttatttgaaatatctagaaaaggaaaatctatagagacaaaaaggagatcagtgatgcctgggttagggggtgggagcagggattgggcatgagggaattttgggggtgatgaaaatgtcctaaacctggattatagtgatggttgcaaaactctatccatttactaaaaatcattgaattgtatacttttttttaaaaaaggcattttatttgaaaaataacttagatattttatattgaatcaaacagatttattatagaaagaaaagcaaagggcataactgtataaatcaagaaagagattttggctaggtgcagtggcacatgcctgtaatcctagcactttgggaggccaaggcgggtggatcacttgagctcaggaacttagaccaccctgggcaatatggcaaaaccctctctctactaaacatacaaaaattagccgggcatggtggtgcatgcctgtggtctcagatacttgggagattgaagtgggaggatcacttgagcctgggaggtcacagtgagctgagatcatgccactgcaccccaggctgggtgcagagtaagaccctgtttcaaaaataaataaataaataaaaataaaagagttcaagaagattaacaagacctatccactccattttctaatttgtctccctatcctcacctcccttttaatcccctctgctattaccctagtttagcctatttatttgtttgttcaacaaacatttgaccacctactatgtgccagccactttcctagatgcttgaggtatagtaaacaaaccaagcagacccctggcctcatggagcttacatattggcaatagaggggccagcatcacctccaggtgtactcccacgactgtgccctaactgttctccctacctctggccttgccccactccatcagtgtccactacaaccatagtgatccttcaagaatgcagatctgatcctgtccctctgcttaaaaacttccaatggcttccagttgccttttggataaacttcaaactcctaaccaggacttgactgtagctgtgtatctggagccggccaggcctttgtgcccaggctgtgtgtgccagctgtagccacttcctcctttgtgctctcctccatccatactggcatcttccctttcctgggtctgccagccctcttcattctctttgctaacctaactcccatttaatctctatatctctgtttagaatccttttgcaatccctcagttccagtttagggggccttcctatagttccccagtctgccagacagatttcatcacacagttcccatggaaaagagatgcacaataaaacatgttaataaaacacgttaggtgaatgaacacccagaaagaaacatctagagagagacaggttgagccaatacaggttaagtatctcttatcctacatgcttggaaccagaagtgttttggatttcagatttttaaaaattttttttggattttgatatttttgcattatatatttaccagctgagcatcccttatccaaaaatccaaaatccacagtgctccagtgaagatttcctttgggcatcacgtcagtgctcaaaaagtttcagattttggggcagtttggatttcagatttttgtattagggatactcaacatatattgacttttgttacttatgtgataccatagcccccacatttaagggaaagagtgtttttcagagttaggaaacaggagctttatatacaatttccatgaaggacacagtgagaaagaaagtcaagatgatttatccctctaaaaaaaatgaacatagcaagattttccgttctaattctataaatgagattaacaatgaagtgatatgcatacaaagtgctaaggttatttggttaaaagaaactaaggtaatattttcggagagaaaagaaaaccagagaataattctatccctattgttggcattgaggatattgcttcagcaggcatatatcttaaatgttttaattaaattctttttactggaacttactctgttacttcaaattagggaccaaaaaaaaaaaaaaaaaaagaataccgtttctctctgctcaccagcttcttttgataggaacagtaagcttaaactatgtggcaagttgacttgaaacttagttactccccaaagaaaagctactgatatgtcaccattttgtaaaggatacatgcattttttttgttttttagaccaagtctcgctctgtcacccaggctagagtgcagtggcgtgatctcagctcactgctagctccgcctcctgggttcacaccattctcctgcctcaacctcctgagtagttgggactacaggctcccgccaccacgcctggctaattttttgtatttttagtaaagacagggtttcaccatgttagccaggatggtctcatctcctgacctcgtgatccgcctgcctcggcctcccaaagtgctgggattacagggtatggtggctcatgcccggccggatacatgcattttaatttggtgaaaaaatattacttgcattaaggggattctgcctcattgcccttaaaaaagttctcttccctacaaatttccaaactaaagggagcatacatcaaaacaacatttgctgtttgtcgctttgatcaagaaacacccatttcaaaaataaactcaaaactaggccagattttttgaaaagtcccttccctaattaaatcagtcaatataaacagcttagcctccccactggataagaaagaaaaagtgggatggggtgagggtgggtaggtagcccaggtaataagtaattgagttgggttccttaagcttctcattttgcctgtcgccatgactgtcttcaacggttagctctatgaatctctatcagacttgagttggaatcacactgtgtgattagggacttaatatagtcttatttgggtcttcaaaagcttcttttgccattatatattataccaaggtaattttaaaaataatcttattggccaatggtttagaaagaaagattttttttttctgaagaagatccacagttctcctctctgtttctgtaaagtcttatatttttctgttttttgtcctttttgtctacataaagagaaaggatgtttaagagtaactgctaggcagcttgctgagagaaaaaagccaagggtggaggagtggggtggggtttaaatagcagccaaattgagcaatagtgtattttcctcttcagaatgaattaggctattttcttctttttcatacttgttctttactgtgtttttgttaaaaaaaattttaattgtgatgaaaaatacataacataaaatttaccaccttcaccacttataagcgtgcaattcagtagtattaagtatattcacattgtggtacaacagatctcctgaactttttcatcttgcaaaactgaaactctatatccattaaacaacccccgtgtccccactttactgttgtgttttaaaaatatttatttatttgtttattttgagacagggtttcactttgttgcctaagctagactgcagtggcgcaatcgtagctcactgtaacattgaactcctggggtcaagtgatcctcctgcctcagactcccaagtagctaggattacaggtatgtgccaccacacccaactactttttttttcttttgtagagacaggggtcttgctatgttgaccaggctggtctgaaactcctggcctcaagcgatcctcccacctctacttcccaaagtgctaggattacaggcatgagccaccatgcccagccttactgttgtttgtaaattagaattaaaaagatggacttttctgattctgtataatgttttcatcaattcatatgtcgaaaagtcaaaattttaaagtatttttaatataagagatacctgttttctatgaacagtgatcctatatttctataggttatttatcttttcttctctcctacacattttcaggtaggtgagacaggaactcattcacatccttgaatctttagccacctctctgactcctcataacgtgaggattgaggctgagttgtcctctaatagcaggaagcagaataatccttttttcctagatcatatgtcaaatttattttcttctctctctttctctttctttctttctttccttccttccttccttttttttttttttttttttttgttttgacacagggtcttgctccattgcccaggctgccacaatctcagctcactgcaaacgctgcgtccccaggctcaagtgatcctcccacctcagcctcccaagtagctgggactacaggcacacatcaccatgcccagctaatttttgcattttttgtagagccagggtttctccatgttgcccaggctggtcttgaacttctgggctcaagtgatccgcctgcctcggcctcccaaagtgctgggattacaggcgtgagccaccacacccggccatgtcaagtttctagaagccatttcttaccttctccccactcatcctccccattccccccactcttcagcaactgtggcatactagtctctggtcttagggttcataccggctgccaggggtccttcttgggttggctccagttttctgaaatctggcagttagttaataagaaaacgagggatataaataatgggcttagacagtttcctctgggtatgcttttaggttctgtcagatttattcattcctacacatgaggaagagaccaatgttcccttcagacatgaatatgaacatagaccagagataaacaaggtggggtgtgtgtagggagtaggagggaagctcaaagtccagatgcgtattagcaccggtgaaaacacacccatttatgaagaacagggatctcatgctggataaggggacaaaaagcagaattcttaacctggcaactaccatactgacagaagcagggttctcactcattaattcatgatattgaagtaccactggtatttctaaaaacagttttcaaagcattatttgttttgtgatctcagtagtttgaaaactccaaaggaatgtttattggagatctattatctaccatgccttgtactagacactgtaggtacccagaagagtaagaaagatgtagtcccttccctcaagaatcttactgtctagttgtcaaaatcctggagtatattataagtagaggccaggcgcgatggctgatgcccataatcccagcactctggaaggccaagatgggaggatcacttgaggccaggaattcaagaccagcctaggcaacatagaggccccatttttataaaaaatttaaagattatctggtcatgatgatgtgtgcctgtagtctcacttactcaggagtctgaggcagaagaatcccttaagcccaaggatccctctgaggctgcagtgagctgcgatcatgccactgtaatccagcctgggtgacagagtgagaccctgtcatcaatcaatcattagatacgtagttagaggatagatagataggtaggtaagtagatagatgatagcagagaaggctgagagctgatacaggctgaggaacaaagtcaggggaccctaaagttattcaagggattaaacaggataaggaaaataaagcactcagcagacttcctgagacactggtcaataaatggaagttgttgtcagtagcaagaataatattcagataaattagctccaggagtagatctcgttgggaatacagggcatacgcatatgcttctcagcagttttatgacaagtaccaaaaatttggttcataaattcagggaaaaaatggctggagcaactgggaaaagatcttggaagaatgggacttacaaaaacaaagggggacaaggaggatagcctagccttataaaaatgagatggtgggcatgtgtctagtgttttaggaacatgaattcaaccatacctgtgtgtgctattcaccatgtggcatcagagatgaatgaggcagaatccctgctcctaaaacacttttcatctaggaggaagatttttgttttaatggtatcaatagatttattaaagttaaaacgtgataaaggctatagtagatgattgaatgatgcagttttgaacacttagaagagagagaagttgcttttggatgaggatcagaggcatttcattgagaaaggaatatattttgcaggtcctgggaggttggctagaatttccatagcagagattggcgttaaggaaaggatcgaaacccagacaaaggaaaatggaggagggaaaccagggcatgcttgtaaaatggtaattattcgactcattaaaggtcgttagaaaaactctgacccttggagagcgagaccatcctggctaacacagtgaaaccctgtctctactaaaaatacaaaaaattagccggacatgatggccggcgcctgtagtcccagctactcgggaggctgaggcaggagaatggcgtgaacccgggaggcggagcttgcagtgagcagagatggcgccactgcactccagcctgggcgacagagcgagactccgtctcacaaaaaaaaaaaaaaaaaaaaaaaggaaaaggaaaaagaaaatttctgaccgttatagcttagccagttaggatgaaatcaggcaaagttatgtgaaaaggtacaatttttaaagaaaatttgaataaattcccatttactgaggaaaaatcattctagagacatctggggctttgtccatcccccattagacttacgaggtaaaaagggtttagaagtagcttggtttttcttagtgccctgaataggaataaagtatttgcctgtacagaatgaatgtgtccactttcctttaccttctaggagatagcaaactttgtcctcttattaaaatagtttaacctacagcacatcttggttatccagggtggtgtgagagaaaagcacgggctttggggttgggcagacttctctgagtcttcattctctcccttctttactgttggaccttgggaagttacttaaaagttgagcttcgttttctcttctataaaacaggactgataatagctaccttaaggtattattgtaaaaattagaaagaaagtatataaataaccaggcgaggtgaatgaccaggcagcacaaaatacatggtggctgcttctcttaccaatagacaatggcgcaactctttgtgggcaagtgtgtctgtctgtattgccatgatttttggtttaccatcaagaaatggcagccaagagcctgctagaatctgctcaggactctgttatcttcttgcctttggccaatacaagcacatgttggacaccgcccaaatgtgcccactataagaattttaaaagtatatttttcccccatcttatcttttcgtttctaggcaagagcgctaaagtatgtggcataatactcacatccggcttggagtagaacagtttcctgaacacctacggggagaaagttgtgcttaaaagcaaataaactggaaagtcaagaaaaattttcctcttgcgtgaatctgcttgtgaaagtctaaaataaaatgtgtgatttgaggcaaatgaaagagatcctagaaaattaagtactctgaagagttatcgtggtggttactggctagaatccctcttagaagcacattgtctgtaggtttttagagaataagagaggtgaattagcttttttaagtcaacaattaaagtgagactgccaacaaaagtaaacaggagctacatttaatttctgtttttcctttgagagccaaggaggccagcacttcaagtccaatgaaactgctaactagctaatggaaaatttttcttttcaaacataaatattaaggtttacaagtaaagataagggtttttttgttgacatagagcaccaaataagacttagccccttttagaaaatttgtggacattcaatatcatattgtctggacctcagtaggagtaaatcatcaaaggaagtcatttgcatttcaggaaccccaattagttttaccctagcaacttttcttgcttttatctcttgaagtttatttttcatggcactttgggttttcttaaagcagtgtatggcaatgttgatgacctttaaatatttatatgtagtcaagactttatataccaaagtcttaagaagacaactgagtcagtcggatgggtgttttgatgctatgaataaaattgaaaggcccaaaattctgatatgacgcaaagacatgaagtgccaaatcaataagcaattttattttttatttatttttttgagacgaagtcttgcttttgttcctcaggctggagtgcaatggcgcgatcctggctcactgcaacctccgcctcccaggttcaagcaattctcctgcctcagcctcccgagtagctgggattacaggtgcctgccaccatgcccggctaattttttgtattttaagtagagacagggtttcaccatgttggccaggctggtctcaaactcctgacctcaggtcatctgcctgcctcggcctcccaaagtgctgggattacaggcatgagccaccccacccagccgagcaattttttttaaaagtaattttagttttgttgttgatgttttttattgttatgaagaaatcgttggtgtatttgatgattctcttggtcagcgaagctgctcttaacaataaataagtgataagtttgtagcaatggaaaaacatgattctaccagtcattaaaacagatttctacaagtcatttgttcaacttgcatgccagtttatgacagtgtcacctttctctatttctagttctcctgtctccttacttatcacataagattagagtcagatacctcaacctagtcttaaaatcccccacccactgccctccaggcacgctagtgtcttccatcccaggtctactcttggcctagtctttcatccttttcatctcattatctcctacactgtttccctggctctttttccccacccagtcatcaggcagcttctcagacagggaagcagtatttgttaaaatacaagttgtaagccaaggataggaactgtaccaaattccatgcttaaatcttctatgcttccccttcctcatagctcccccaagcctttacttatcttcatctatgtcgttaaaacatgaatatttttctagaagaaaaaaaaaagcttccattagaacatatgggattatgccccagaaaagattcagtcctcaagtcttgtgctttttggacatcatcaattaaaatactcacttgtctcaacagaaaataatattctcacttctgctcaggcaaaggttaggttctgaatgccatccagctcagcctgtccatcctgcacataaccacctccccacactccccaggcacattctcctcggtgacaaggacctaccggtatttgaatgcactccagttgaacccatgctgttaaggacctgtcacttgtggagttttacctttcaggattctgggccatcattactcattgtcacctagatcacatgtctttttcaaagagtcaaatgcccttcacataccaagcacacttcactttcttccagaaggttgtcgccactaacaggaggtggcagctgttagtaattcacatcaaccctgttgagagcttcaaggttgaaaaggaaaaacactttctccagcgcaaacaaccagaatcagttttaagctggtgaggttttgttgtttggattgcagcttgacctataccttttttttttttttttgagacggagtctcgctctgttgcccagactggagtacagtggcgcaatctcttctcactgcaagctccgcctcctgggttcacgccattctcctgcctcagcctaccgagtagctgggactacaggcgcccaccaccacgcccggctaattttttgtattttagtagacacggggtttcactgtgttagccaggttggtcttgatctcctgacctcacgatctgcccgcctcggcctcccaaagtactgggattacaggcgtaagccactgtacctggcccgacctataccttttacaagtgaatttacaaagtggattttcttctctgaaattttgctcggggaccaaaatttaaataaataccataagtgaaagacattaccctatttctcccacataatcgtcactcacccccatacatgttaagtgctgcctgattaataagagctaaaattcaataagcacttcctttatagcagggactatcctaagtgcttcatataaagtattacatctagaacttcagcaactctgtgattcagattcaatgtttagctaccattttgtaggtgagaaactgcttcatggggtaagtggtcatcacaagatcacatcataagcgctgcagccaggactcaaatttacctattctgcttcagagactacacttttaaccattaattccatgatgcaatactgtctcaactgaaatgggattccaccttggtggcaaagtcattatgatcaaaatcaatgagcccggcacctcccattcaatatcctccccatgctgtcagcatgacttcttgaacagtgcagatctgatcatgacactggtataaaagttgtagtgatttctctttgcctacaaaataaagtacagatcttgaagatggcctaaagggccattatcttccaccatctgcctctccatctatatcaactgccacctgcccatgccctagtgatgtcacttgcagttccacaactggcctgtgctgtttgatgctttgagatcttcaaactttctgccctgaactattcctcccctcctcttagttagcaagttcatgcacatccttcagaacctctcccaagcatgtcctgtgcatccttccctgacataaatatcctctcctctgtttgctaccaacacatagaactatttatcaaaattatcatagccactattttcagctctcatgtgccaggcatagtattgaacacttagcatgtttgctgggtacaaatattgaaccacagacataattaagggagaaatgttactgtttctttaaaaaaaaaaaactgaccataatttctattttgagacctcattcagctgggagacagaaacttagtatcagccaattcaggatcccctctagctcctggggttgcagctaagttgtaagaagcttaggcagagtctagggtgtgtgtgtgtgtgtgtgtgtgtgtgtgtgtgtgtgtgtatgtgtctggatgagattgaacctttggtatccttgtcaccattccccatgctagtgtctggttggtgtctggtgtcgggatgttggtatctgcagccttttcagatggattaggaatctgtgccctcttggattaccagaaacaatttgcctctcctgaaccactttggactggaaagattggtggaaggtataacactctctccagcccaggtgtaccacacagacatttctttcattcccactccatgctgggctcgcagggactctgggactgagtcagttctccggagtcttgcctgggaccagggcccacatcctttgtgccctcaactctctgcttctctggagctttcatcttgccctacataacactcctaactcccctccactttccctctggctctccttgcctttctttgttagtcctagaaagctgtaatgtctgctgggaagaaaaactggctctaattgagtattcttgcacatcttaagtcgggcacatgcattcctttgttctatgagttctgttgtgttcccttgtttttctttggtcagtgaatgacactgactgggaagaaagatgaaggttactggaaaagtcaatgttatgagtaagcagttaatatctcactgttaccttggccccaaacacacacactcaatgattatcccatattaatttttataaaaaccttctgtggaagatgtaattaccattttcacagaggaaaaactgaggcttagtgagatcaactgacgtcacccccagcaggcaagatcttgaattcagtccgcacttttgaccaccacactccaccatccttagcacatgggactgaaataatttctttagatacctgggttttccactacactgtgagttccttgaagttagggttggacctcatccatcttgatatccctatccctggcatataacaggttctcagtaggtggcagttgaattgaaatgggtcaaggagagagaaaggaaaggtaagaaggaaaaaaaaaaaggagaatgagaaaattcccttatcttaagctattttgaaacttcctgaatgatactctgccagctaaaatataagtggaatgaaaagtttgatgattatctaagtcacgtctagcactgagctctccttatattatgctgtcaaattattctagccatagaaattaattccttgtctccaggaaagaaaagggtataatgtggttggtgacatagcaatgacaagtgaggaaaatgtgcatatgtgagcagtgaccagtgtggacagtttttaccagtcaatgcagtaatagctgatttttatttacttttctagacagtaccatccaagatgctggtggcatataaatctgataacttgaggaatttcacagctttccattaaaattttatctgaaagcccttgttttaccacattacataaaagcctctgataacaagtatcatatttatttgcccatgaatgtaggtgaagggtagaagttttaggctgtgacatgcccaagttacagtcaacgtagttttgctgaatagtttttttttcataatcatctattatgtgttttattttttaaaaaaattttatttgatgttgtaacagataactagaacacaacataaatgaaaccataaagttaatcatttctctgccccacctttcccaggtaacttatattaacagcctggggtgtgttcttccttggtcatgtaatgtttgtgttctcgcacaaattctcattcatagaagtttgctttttctccttatagtgtttctcctgacctccttccttgcctttaccctccagcgaatttccctcattctttccccctttctcttccccattcctcctccatctcttttctctctctctttcttccccttctctatttttcattttctacctttttttctttctttctccgttagccttggaggacccaggctcttggaaaattgcatttatcttcaaggtgtgacagttcagttgagttttgactctgaacatttttcttgggttgtcttatgcctcagcataagaaaggaatagaaaagggtaggcagaaagtcaaatattcagttaatcaagattaacttatttgatggaactactttagaacccaggatgctttttaaagttattaaaatgtttattatacaaatgtaattcaaagagtaaatcatggttcttgtttttaaaaaatcctcaaagtctatagaagtgtttaaaacaaatgataaatttttatttatctgccagaattcttcttcctgcaatgccactctccaagaagagtttagctttccttcatgaagtttttctggatatttataaaacatgtaacaaatattgtatgtactggtggatgtagacagcaaatgggaagctttttcactagataatgtggacatctctccatgtcagcacatataggacccccttctttcactttaaatgctgcataatatcctttgcaattaatttaactattttctacatgaacatttaggttgcttccaatttacaggatgcatttctaatctttcaaccaagacttcccaaaaagaatgctgtcaattcttgtctccttaatgacttggagctgctgacctgagtgactgttatttaaccagtgacccccatagccttgacagggtcctttgtgttccgtgtctccataaggacaagaacttgctggctaccttcaccctctgaggctatccctgtaggtctcattctgctaatattgttgctctgttctttcctaacctttttgcctctgtttaaacctatacaggtttgatacaggctccatgcgcattgtagttgactgctgtgctaacatactttggtagcatagatagtgaataactctcatctacctagtcctcctctctcttttctttgggttctcacctgtgcaagatagctttcgggataatagccaggatgcattaatgcctttacttgggaccctggggctataaagaacaacagaaaacctggaggtgctttggtcactgtgaaacagctgccacacaaagagaccttatccagagaaagggtgaggccagtatcaactcagaggatctgggggctcactggcctatttacgggaaaagactgtgatagagatgttaaaaggtatttgaaaagacaaagtaactctgagacgctgaaagaaattatagagttttcctccttcatgttcactacatgaaatagatcatttctaaggggttggcatggccttaaatgcatttccctaaagtttccattttaacatcttcttctaggacacctaggatggttgttcacttgtttttcattttgttgtgagtggttccaaaaaatcaaaatatttattaaagtgaatattatgctagaagctatatattgttcacagtaaaccccaacacccatttgagaaagcagcacatcattcgttcctcctaatattttctctcctaagcaaacaatctatgtttcaagtgtgttctttctttgtagtgtgttgtttatattggtcattaaacagttcctaaaactgactttcaacttatatataagttgtttctctaaggtgtcaacattgaaaagaacagtatagagcaggggtgtccaatcttttggcttccctgggacacactggaagaagaagaattgtcttgggccacacataaaatacactaacactaacgatagctgatgagctaaaaaacaaaaaaaaatcacaaaaaaaaaatcccataatgttttaagaaagttcatgaatttgtgctggaccacattcaaagctatcctgggccacatgcggcctgtaagctgagggttggacaagcttggtatagatgaaccagggaatttattgtatgactgtgacaagaaagagttaataattatttagcaaagattcctacatttcaaataattgtttttcacatcaaagctttagttgtaataatagaaggaatgtcaaactgaattggtaagaaataatggtagactatttctaagtaaaatttagtaatattttaaagtataggctgggcacggtggctcacgcctgtaatcccagcattttgggaggctgacacgggcagatcacttgaggtcaggagttcaagaccagcctggccaacatggtgaaacccatctctactaaaagtacaaaaattagccaggcattgtggtatgcacctgtaatcccagctactcgggaggcaggagaatcgcttgaacaagggaggcagaggttgcagtgagctgagattgcaccactgcactccagcctgggtgacagagcgagactccatctcaaaataaaataaaagaaagtatagaagtaagtaatgatagccattttttttttagaggcagcgtcttgctctgttgctcacactggagtgcagtgacacaaccctagctcactgcagcttcaaactcctaggtacaaatgatcctcctgcctcagcctccctattattagtagctaggaccacaggtgcatgccaccacgcctggctaatttttttatttttattttttgtagagatggcgtccccctatgttgcccagactggtcttgagcaatcctcccacctcagcctcccaaagtgctgggattataggcatgagcccagcctcgtagactatttctaagtgaaatttagttgaatattttaaagtataacatatgttacaaaaccaaattgccataatatatataaaaaaagctaaacttgtgaataaattgagaacccaaataatgtatgatttctagatatagtctttttaaatatacaattaattaaatgtattagacttacattgaaaatgtattagactttaaattaagatgaaataattcaaagaataagtgctgaatctagaattttgagatgtatgacaataatctgaaatttctagagctttttgtctgaaaaaagatactcattctcacaggtccctcccaactaatcaactgtagtaaaaaaacaaacttctcaatatctatatgaatcagaccctctgaatatactagatcctcaataagcatactctaatttgatgtgattttaaatatttcttacaggttattatatttatctttcactgacagttggatttgtaggttgaaatgtttaagagagaagggaggaaactgacttggcataaatgcacacagtgctgttctggctgccagtgttgtgggttctgtcactgactccctggttttgactcaggaccacctgcgggaccttgcacacctcagtctggtgtacctctgtgcaggtgggtgctgtgctgctctaggaccatgttggggacttattccagtctctctggtctttccttcccacaacacactccagcaccagaggtggctttggcgaaggaaagggagcaaaaaatgataacctatttaaaaacgtcttttgaaaagtgtaaattttaatggcatgtgaatcatctgtccattaaaatatttaaaataaaaacttttaaacaaaagaaaaaatgtacaaattacaagttccagactggccatgcacaccctttctaagacaggctgtgcacctttttcctatgtgtaactttctcacaaaatattttcgcatttttaaagctttatttcttcattaatatatttgattttaataaaaagtaaaatgctttcgattctaatgtgatgcattatttctgaaagcagtcttaagacaggaactaaagggcagtgtgattttacagagaacatctttaatagtggctgggagtttacacatacacacacttgatatgtgtaactatttcaggtcattctttcgtcttgtggaggaagggacagacaaggagaacggaggtaccagttgagcaaactaacccccagctcatgcagagagacattagcataattttgtattgttgctgaaatttcttcatgtcttacttttgatcccatgagacaagttgtttgcttccatctaaaaatatcggatgatgcctctacattgcagatacaagttaaaagtgtttttccagaatctatgttacaaaggaagcccagggacctctggtcatagtgatgaatttcactggtgtaacatccatgctgtgtgggaggtgagatttggacccaaactgtgtttttaatcaccaatttacagtgatgtttcacacagaagtagagggatctgttccacccttatgagatttcacctgacccagagcacttagaaaacaagataaagcagcagcaggagaggaggccttatctgttctgcccacagagctcctggctgtgttctccagctaatacttcttactcccccccacgcgcaatggcagcggcaatgtgcgttataaactgcaagggctgaccacttcttcaaagcttaagttctggacatcacctccctctcccccaaacaagattgccacaggacacgaggacacagaacaaaccatattaacctctctgcttccaatgcctagcaacaatgtttgtggttaccccatgactgtgtgacagctgtgtatgtgttgatacctgcttgtgataccataggtaaaacaaaatacaattttaaggaggataatactttatggcagggaggagcctgtccatgaaggtttcagtaaagaggtttattcagtggttgccatggctgctaatgctcctgcattctgtcaggatataagagcacagacaagtaaaggtaaatgtggtatcagctgtttggtaagggaggtttctatttcctacctagtgaggtcttctctgtgtctatatgcatatttattaccttaaatatagaacctggacatttaacaacagggattctgcttgaatgagaataaagccaatttcaaaccttactgttactttcatctctggaggtgacacgtgagagcaattaagagaggactctgaggggaaaaaattcctacctccgttgaaagaggctggaagaacctttgaagaaagatgaaacttaaactagcaccatcccttcctttagaatattaactggacgcctatatcataaatgcaaaacaaatgcaaatggatatattttctaaaattccaaagtttgcaaagctgaatccaaaatctctcgaaattacagtcatgacgaccgaaagaatcacgtctcttgtctaatcagagacgatgcttatggaaacaaaaacaggcccggaaggaaggcttcagcggcattcaccaccacctgcatctctgctgtgacttacactgagaagagggcatgctgagaaaaaggatggttattttccttgtaatgcgagctttttttttttttttttagctgtgaactttttaccttgcttcattcatgcttcatttgatcaattactaactgtatagcctctgaaaagcgagcgcgggcttcttaaagttgatattttgcttttggattcctctgcattttacaacggggggaggttaattaaggcacctttctgattgaatgggcagagggactgagggtgtgtgcttcggtccggtccccttaataccgtaaggacccaaggaccgcggaggggcgagtggagcgcgacgcttccaccccagaatccgttttcaaaccttagggagccttctttgccattgaaatgcaaatccggtcctgagctcccgggccaatccgggaggcttcctgtgggattacctggtggcgagcgagcgccgagccagcgccgagccagcgcggcccctcgggtgcggcgggcgcggggtggactgagcgggcccgggcgggacgagaggtgggcgagcgccccgcaccctcggcgcgccgcgcgggatcagcgtcctccagccgcgctgccccggcccaccgtgcagctgtagccgcggcgcggtggcgcggtggcgcagggcgctgctgggccgcccattgttgagcgcgttgggccccgccggcgatgccgcgcgccgcctcctcggagcggcggcgaagtttgaacttggcgtcggcctggagccccgagcagcccgggggcggcggccgcgaggcgagcggcgatggtgagtgaggagggcggctgggcacggagagggaggcgggggccggccggctgctttctggagcgcgtctatttcgggctctgcggcgactctggaaagccctgtctggaggatggctcccaggggctttcacggccagcaccccggctgatgggggcaggtggcgtgctccgagggtctcctgacactcctaggccttggctttttatcagagaggcagtagctgccactccaagaggaaaataattgttgattattgacagcatgaaaacttttcggaagaaatgatctgtgaaatattttaattttgataaattgcttcccaccagggcccctgctgagttgagaactccttgcctttcttaattttactggatttgtttctgtaggaaaggctcctgaagtgcgttgaggggcacgcctacccccaacccccacttgctccagatcttaagacagttacttaaatagtgtgttccttgtgctgcagcaacacttaaatcatgaaaatgaaattctacctgacgctcgctttactccgaattgccagaggaataaaacttttgctggtgggggaggggagtggttacaaaatttcaacacctggagcactctctgggggtgggatgtatttctcttcctctaggatgtattttggcattacctttttcccctctccctttaaatagtagtgttgttgtggcgcactgtgtgcacgggagcttctgcactgggagcaaatgggtgccctgcatgcgggtcatctccatggagagattgctgtgatatcggggggtgcaacaggaagtcctagcacagaggctgccagagagagttctgtgcattttctgtttttaattagttgttttaaagcctagttaaatgtccgtttccagttaaaagcaccctggtcggatatatggctagatctttcccccaaaaaatttcaccagaagttggtttacattttaaatttattttgatggttacctttttttttctgattataaaaatattacacaatcgttgcagaaaaggtgtaatatacagagaaagaaataaactcttataacaacatctatgttttgtttgctaagacctagtttttcacagaatcctagtcatttgaaaacttttcagctatggacttttttttttctccattgctaacaatcctggtttaggaactaaagctaggaattgacaaggaaataaacttacttaaaaaaatgttataaccaacaataacttattcacattgcccatgagttggaacagaatttattgtggcaatttctcttgaatcaacttcccacatctgctcccagcaaatggtttctgtttgtacagcctattttgtaaatacatctctctaccattaaggcgaggtgcccaaacacatacccctttccagtgcttgtggcttggctcatatggttaatatgtttattggcttctgcatcagaacttcctcaccatacatttgataaaaccctggagaaggttaccaagggatgttgtagagaattcacttccctggagattttaagaataggataaacatccatctgcctaggatggcttcagtgcagtactgtctggataaaggaagactaggtcactactctgaacctcaaaattgaggaattctaaaatttgtttagaattcctcaattttgacctgggaccaggtcctctgtgacctgggaccaaagcaaattaaggttgccaaaagtacctgagcccagtaggaggtggagccctgttttgatttatgtgaaacaaagttcttcttttggtaacagatacgttaaattattcttaggagttaccaatccttttctattatggatagaaaatcaacaatgatttaactgctttctgggaaggtataggtgaattacagtataaattctgtgattttaaagtaaatgaactgattcatgggaattaaaagttttgcctgaaaggtgggcagggtgtgtgtgaagagtgtgcctgagttttctccacttttaacctagtgttatttttagaatcctgtcttatgtgttaaatctggttacatttttaaaacatcaacattctactgtctcttcaatgtttattcttgctttcccttttcatgcagaacccatacagacctttgaccaaaatcaattattcttgtaagttctgttcgaggatgtttccctggagtccagcagtgctgaggttttgctggtgacttccagaaggtcaggatttcatgggttgccgcttcttctgactttctgtttgacagaagtatcctgtaattctaaccactgtgtgacctcaattgccttgacaccttcctccccttctgtagtatcacttgaacaggagctgtttcctcctgcaggatcactgagaggggttcactttctagggaaggtcatgtcagaaagaagattgggaggtagagcctggtggctgggcagtcttcaccttgcctgaatgagcaatgcctccatttcacagccttcagcttgtgggatttcttcatgcatgtcagaaactagttttcttatgctgttgtaacacccaaagaaggaataggggcatgaacaatggtcattcatttattcagcaatcatttactgtgtgggaggcatcccaggaactggcgatgggttccctgccctcaggaactcgtcttataagaggcaaaataaaacatgttaataagctagtgccattctgaaggtgtagagtacaggggttaagaaattaagtttgttgtaaagttaaacatacaccaacctatgacccaacatttccacgcctaggtatttacccaagataggtgaaaacaaatgtccaccaatgacttgtacagaatgttcatagcaaccttatttataatgaccaatacctggaaacaaccctacatccatcaacaggaaaatgggtaaagaaacagtggcacatccatacaatgaatacgactcagcgatcaatgggaatgaactcttgatacaaaaacctggatgagtctcaagagcacgttaactgaaagcagccagatacaaaataataataagcaattctattcatgaagtgctagaataggcaaaactaatctatgacagaagtcagtggttgccagtgggtagggactgactagaaagagataagaagggattttctggaatgatggaaatgttttatgttttgtttttcgtgatggtttcataggtatacacaattatccacacccatcgaactgaacacctaagacctgtgcattttattgtatgcaaagcattacctgaattagaagaaaaacttaggttctagagttacacaagagtatacatcccacatctgcctctaggcatatattaccctggacaagatattaaataaatacctctgagctgcaagacattggacaataatagaacatcttcatagggttgttgcaaagattgagttaatgactgaaggtacttagcttagtaagaactcagtaaatgtcaactactatttccaggcactgtgataaatataatatgtgattttggagttgatgaaaaagtatttacacttttgtgaaagccatatcatttaagattatcaaggatcttatattaactggtatccttatcattattactatgcataccttcattttgataagtttgtttttttttttttttttttttttaaagcaacaagacagagtcttgctgtgttgcccaggctggagtgcagtggcacaatcttggctcactgcagcctccacctcccgggttcaagcgattctcctgcctcagcctcccaagtagctgggactacaggcacatgccactatacccagctaattatttttgtatttttagtagagactgggtttcaccatgttggccaggatggtctcaatctcttgacctcgtgatctgcctgccccagcctcccaaagtgctgggattacaggtgtgagccactgcacctggcccttgatgagtcattttttaaggttgtggggatttaaaatgtgaagttcttgtgtacgtgatcaaaatactactggggtttggttttgccagcagaagtaaactccaaagagaggaactacgcactaggcaaactcctttttttttttttttttttcctgaggactgatctgaggactgatttaatgatgattgtcgaagctgagctcccagatgaggctcacaacatcttctgggaatccaaatgaaaggttaacatactatattctcttcccaaagatgtaggtagaaaaaaaaaacaaaactcgatctctctatcaaaattaacgtcatgcttttcagtaaaatgctttggacagagtggtaaatttataatagtttatttaatctattaagcttcagtgatttaatttaagttcaacaaagcatttgggaaagatgttatatattttgccaactccaagtgaggcattttgttgttgggttggtttaattcattcagtaaacatttgtcaaacatttactgagaacgcattagcctctgggaattcaatgatgaataataagacattgtaccctcaagggttcatagacactccagccacaagtgtgaatgtgtacacatttcttttggaatttttctcagagcagagaggtctgtctcaggctagtctttttgtttgtttttttttgtgttttgttgtttgttttaaaagctcctgcttacagtggaggtttaaaatcctagttcttttaattgatgttattttcttaaacattggcatttctcattaaggcttcacttgttattccttactaaaaatagcaaaaacaaaatggtcttatataaaggcaattgagtacagtggaaaggtcagagactgtgcaagtagaatgacctacgtttgaatctgagctctgctacactagtaatttggagagtcctttaagcagctgtttcctcatctgcaagatggtgataatgataccttaagagaggtattaatatttattaggttaaggctgttataaggattaagtgacagaatacatgtaaatataactaggctggcacctgataggtgttaattcctaacatttattgagtacttactaggagtcaagcactgtctaatacgttttgtgctggctgattttatcttcctcacactcctatgaggcaggcactgttactatccccttttaaaggtgaggaaaccaaaatcataggttaaataacttgctgagggcatggaggtgccagggttagtacccaataccatcctgtcaattaatggatgaggtctgtaatagatgtcaactatctttcccttttagatatgattgttttataccaataagtggaactaactagtgccctgcttatggctgcatgcagattaatactggtggtgggggatggttgactccttgaatatgttcttaaatggttaatgggtctaccacctttgggggtttgtgggatgcttgtaggaaaggctctaatgaacatgtcttttcttttcccagcccctcacaagtccacctgtgaggtggtcctctctgacattgtccgttgctccttacccccaatgactccaattaggaagtcagtcgacttatttgtgaacaaaaaattggagaatcatggctgcctattagaatttgacctatgctttgtgaggtctatgtagggatggacatagatgcaatattttcttggtctccaaaaaaatagcaaggtaagaaatgtgccccagagcactgttacagtaagaagaaaagtctaccattgatcctggatatttcatatttcctatttccattggcattttctcaactcccagattctggagaaccttgagctaaaacttaaataaaaataagttccaaatggtacgttgaaaacgctgctgatttaatgaagacgaagtcaccttgaccaattcattaaaataatgtatagatgcccaggggaaaatgtaattaaataaatatggatcctagtatctgttcctatatgagccttttcacttagtttctcccccaaagtcctgagtgtcgtggaagatactctggattattggtcctgacatcaaagcctctccattgcagtgtggagttaactaggcagccagaatctcaggaccatttcctcagccactcaagtggtgccacgttggtctatttccagacccatcgaagaagcccctcagcatgcagagacctttggagacactggactgaaaccagatggtgcagaaagaagcccctaagcaaagtgttgcttgcagccctgtatttgaaagagtgccactgtgtaccaattatgtccatccaaatgagccgtattattttggggcaaaatgactgggaaatgaaattattaggactctgctctctgatggggaaaaaataaatctggaagaagaacctacaaggatcttagctgtctgcttgtctctgacactctcgaggccttgtgccaggctgctttgctgtgcaaaagctccacttcagtcttttagtctgactcacaatagacgcacatggttgaagttaggagaattgcaggactgtcacttgaagtccctctcagcctcttcaccatcgcccccagcctctttccctctaacattaagccctttgtgtcggttcccatggttacctcctcactactggcagctggaatgtgatagtgagaggaggctgcctcccctactgagccaggtctggctggggcggaggccattgatccgcagctggatttgtgaaatggggtcacagtccagtaccttctctttgtcgtgggttctatacctttcccaggcttgacatatcagggttgcagtgggaggggacatggtgggtgatggactgctcacaggacatgtcctgtcataggctggcctggcctggcgtccctgacctgccaaactcctccctgaggtcacccttccatgtgtgaatgcccattgagggggaaggggctgctctgcttggtcaaataaaaatgatgactcacttctctacctgctttctgctcagattctgttcccaataccatctgttcttaagttagtcaacattaacaagggtgggctccagtctggaaagaatttgcatcaaaggcatgttttcacatccagcttggaagaccaggcaggctctgggaactgggggatagcatagggattcaaggttcaagatgaaaacaaaactagccgagaggtttttgttgttgtttttataagagacagggtcttgttctgttgcccaagtggggtgcagtggtgcaatcatatctcactgcaacctcgaactcctgggctcaaacaatcctcccatctcagcttcctgagtaactaggaccacaggcacatgccaccgcacccagctaattaatttttttttttttttttttggtaagagatgaggtctcactgtgttgcccaggctggtctcaaattcctggcctcaagtgatcctcccaccttgacctcccaaaacactgggattaaggtgtcagccactgtactctgccccgagagtttgtcttgaagctatttcctgacatactatttggaggcttcttaaattccttctcatttagagtctggtgggccccagagttgaggcaggacttggaattacaggtggaaattaagcagccctggtggtgagggtgaggggaggtagtttctagtagaaagcaccaaaaatcaacactcctgaggaattcaatactggaagaattgttatgctcttcttggaacaaggcaaatctgttttcagagatctttcagccctgtaggtatctaactaagcacttaagtgatgcgattgtgggagaaggcagttaagggcacactctggagccttataataggttgggtccaagctttaccacttcctttgtgatcttgagcaggttatttaagttacgtttgcttcagtttctttttctgtgaaatgaggacagcatttcagagggttgctgtaaagattaaatttgttatgtaaaaatactttgcatgttgtacagccagcacaggtgccaattgtaatgtttttaaatgttttgagaatgtcatgctaaactgaggacatagattttatcagttctactttgtggtatgtatgtcagtgggtccagaattcccctggagagcacaggaaagtgctggggtgagcaggaacatacaggatgaggaaaaaaagaattcaagcatttatgacactaccctatagtaactaagagaaaggaaaaatgaaggggataagtagaaaatcagcccatggaactatagtcacaaacacttagaaaaggtctactgtaagctgtaaaccattacttttccacaaatgggctgcagtttggtaccttgatgtccatgtaaattgtgctcccaaagaatataaagtaaccactgggaaaagctgagtccccctttgggtgatagcaaaggttggaaacatttaggtttgatatttggaggcatttaaatagcatggaatgtctattatataccctaaaaagcagaacgaatcttggatattatggacacaaatgcatttggcatgagcttaaaaaaagtgcatgtgagcttctttctaagacccaataatcctcttgggcaaagtaaggattaggcctccctcacaaacaaggcagggagttcatttttgctaagattcctcagctgatgccaaatttagcaagggacccattttttcccaatgaatgacaatctccatttacatttttaatgtccactcctttaggcaggtctagggctggagcaacttatttgcatatagataggagacaggaccctggctcctacagactacattgggaccctcagagaccttcctgagccagagtccctttacctcactcgcttacaaaaggggaggggtctcctaccccagagcctgaagtaggaaggactcaggggctgaaaaaagctggggccaaactcattctgttttaaagacagccttgaagatgcattcaccaacagccatccctgcctagtgcctgcgactcctgccagtgagaggtggcctctaggcagctcctctaggttaattctgtcatccttgaccttgaggagccctttctttcacaccactcactgggtcctctatatctattcccaaggagctcaggtaatgccctatattttctgttcttatctgcaaaaaaacccctccactttggatttaaatatttatattcctccccaaatgttttgggcaatttgtagttgccctttttaaggaattaacccatcaagacaccaccatcctgtcaccctccccatggtgactttccacatccatctcccttatgcaggccatgttgattgaacaatgatagcacctgtcttgcagtggttattaagccacagggtagataatactttgtcccctttttacagatgaggtcctgaggttcagagagaatagtggccaggaactggcagagatcagattagaacccaggttgatccagctacaaatcctttgtgtgcctccccaacaagactggaggtcagaagctgtcttttattctacaccaattccaactcggagcctgcatgtagaacatgctcatcccttgttgatgtaggtacgcagatcatgttttctcacttgggatttgccatgtaggccctccccctgctttttacctttggttcatcaactgtcaaaggtaaagggacccccaggctcatctgtactaacctcctcattttacacatgagaaaatagtagcccagaacatgaaaatgacttgctcatagcaattacagagacggccttgtgcaggtgtcctggctgcaggtccagtaatgtttcctgctataatagggtatgtatatatggccttttagagggtctacttaaccatccgtgctcccttccctgatgttttgtgggaacagggaagaaggattaccaaatcgactttcctgctttacttccaccgtgcttgttgcatgttctctttcttgctcctttccacaagtagctcctttccaaagtgcttttctggagatgattaatggtactacaccatgcagcatagtctaggagaggcatgtcagaggtatttggactgggatgtgttctatgtgaccccagctttaccctttgatgagactcccctgatgcaggatgttagccctttgtggcttcagctgagggtctgagcgttggctgagttatattcacattgatgtagtccaagcagaatatcagcaacagagctgtactctgggaagacagtaattcccattcgaatgagacaggatagataactgcagggaacccatcaggaagctggcctcgtgtccactcggcatatttttattaaccaaatacttattgggcatcatccaaggaagagaaccatatggggccaaggaagaaaggagaatctcaaataagattaagactatgacatcatagttaagagcatagactttgtcatcagccagatctggagtcaaattcttttttcaccagcatttggacaaacttcctgcacttctttgagtctgtttcctcatgaataaagtagggactaatagcagaaagtcacctgccttcaaggttggctgtaaggatggtaagaagctgtgcagaaacagtttggcccccagcctggctcagagcactccataaggtaatggcaactttgaggactgatgcttggatacctgccctccctggggcatgcgactgggggaagcaagtgtctacaccgactgtgtaaaagtgaatgacaaggagagggaggcatgctgagtgtgggctgctctcatggtctcttttcccaggacttatggcgtgtatgtatatatttattcagttaattttggctttcttcccattaatttataattccacaaagggaaggatcgtgtctgttttgccacgagtccagtgcctaatccaatgtgtggcctgtggttagcccttagcaatagttgattgaatgaatggatgattgggctaggtatagatgtgactaggctctgggtttcagcatgaaatatcttttttttttctttctttctttcttttatttatttatttatttttgagacagagtctcactctgtcacccaggctggagtgcagtggcatgatctcagctcattgcaaccttcctccacctcctgggttcaagtggttctcatgcctcagcctcctgagtagctgggattacaggtgtgagccaccacaaccagctagtttttgtatttttaatagagatagtgtttcaccatgttgaccaggttggtctcaaactcctgacctcaagtgatctgcctgctttggcctcccaaagtgctgggattagaggcgtgagccactgcacctggccttgaaatatctatcttaatatatcctgcatcatttcagcagtgtgaccggcgctagaaagttcttgtaggggcaggaatgctgtctgggtgtcaggggtagggacttcatcatttctctagatctagggacagttggacttgagagaggggtctcatctgaatttcagtcagtctactttcttcttctgaagcttcccctttaaagaggcttttggtattaaatgtttgctactgtatcaatggacttttaggatcacagaatccaaaggcagtatggaacaagagagcttaaaaattagagtatgagaccctgctgtgccagtcgtgtggcttagaagtcctgaccttgagcgaataactgtccctctatgaggctgtctctgcatctgttaaatggggataaataatacttgctttacttgccttttaggattattgagggccaaatgaaataatgtttgggaagtgctttataagctataatctggtattaaagtaatgaataatggttcgctgtagagatttgtattgttctctgggaacactagtctgttactgtaggctaatgatagaggatagggaaagaaaggcctagactgaattttttcaggaggtatttgtctctctctactgatactagtttcacagaaaccctgcttcttcctccactggctattttcagcagttattggagctctcaaagtaatccccttcaccaactagtgtggagtctttctgctgcccacatatgctctcaggataggcacttccatttcctagagaagatgttcctttaaaaatgtagaaaatttagacccttagactcattctattaagaaaaaataaggctaattttactattatctgataattaaaataataaacattaattgtaaacaatttgcaagacatagaaaagagagaagaaaaatagtacccataatcctgtcacccagtagtaacattttggaatacttgctggtgttttgtttttatgcatatgttttatctcatatgaataacaaaagagtgatgtggaaaaattaaaggcatacatggtttgatatgtggttgatacctaccaaagtatacaaagcccagtaatcctaaaaggaatctaatggggtaggtagtggagagggtgaggcctttagccatagctctttctactttttaatttaatttttcttttcttctttacaataaggatgattattgcctcaaatgataagaagattaactgaattactgtttttaaagcacaaataatctggtacataccatgtgcccagtaaatgtaagtttcagttctacgggtaaaaatttaataattattgccaggcactgttctgattgctttatacatattaattcattcaagcctcacatctaccctttgatgaaggtgctattagtattcttattttataggggaaaaaacaggcataagaggttaagtgacctgctcaaacaccttcctaggtgacagagccagaacaggaccccaggcagctggctccggaatccacatcgtccatatacattacacagcctgctgcttgttggagttgtcttaagatctaggctctgagtgcttgtagctaggggcacaccgcttccatgaagatatcatctgttcactataaagcccttgtgagagcccttggttttcttatgcacttgtcctgggctactagctgtgtcaaagggctcagtgggtagagggactgatgtcagcagtaaactgaagcagattaatatttattaggcaggttaaaagatttggcaggtcatttggctttttctcctatccaccctttcctcatctttctgcaaggttgacatagaggtcattggctaagatctggagataattaagcttacggtttcagaaagagtcagaaatatgctgaatgttactggggtatattgtacacctggatttgtttggcaagtttcagggggaaatcaagtgaaaaaaagcagcagccagagcaggaggtgcaaatggacagaggtttgagacatacaaagtgcatctctgcagagctgaagggttatgtgtggccctcctgtaataaaacaagctgtagaccagggtaggtaagcagaaagacaggaggaggctttaagtacaaatgaatggcatgcctatgactaaaacactagataggatacaggcctgagggcatgcagagggagcttcctagatggtaaataatgacttaaaaaggaaaaaagatgagtaatgagaggacaggacccagaaggttaagacttaaatgtgtaagttacaaaaggtcagtaacaggaacaagggggccttttaaagaaagggtaattcattgagatgtctgtgaaacggctgatcaatggtcagttatcagaaaatgaagagcacctatgtttggctaagaacagaaatctgtgcctgagggcatcacttcttaaaatcttcttcagacactgaaaaagcttctaatctaaggccttttcagcctcctggagactcaagagaaaaagtgctgagaaacctacaactatggcattagagacctgcaaacccaggagaagggggatgacaggatagagatgcaatagtaaggctaacttcatggatgaaggacacagagtagaaggaaaacttgaaaaccaagaacgtggctttaaataagacaaattgccacatgaatgagtgtacacacccaacataaatcaaaaggaatttctccaaaggattctgaggacaaacttagccctgtataaatgcatcctgtctacttaatcacaaaaagcattctgattgcctccaaacataaggcaacaaaattgcactgagccataccagctgtttgtcgaaggggctctgccacagtctcccaactcccaacttttcttgtctgtcccaagaaagcctgccgctaatgagatggatcaaaagttagggctagattctattttcaagaagaaatcaactcagagcctgatctagaaagtaactagaagaaaagaagatcccacatttcccaaaatagatattatgaacagtttaatgcccttatggatttaaggacatagaactttgttttggatgcattacaattatttcctttacaggttcctatgattcattcagcaaatatgcattgtgtgcctaccaggagacactcactgtgctaggccttgggtgtgtagaagtttcaaaaaacaaggctgaagaaaagccagaggtggaccctgacctggctgagcttatgtcttaacaacgaagcagacaatgcacaagtgaacaatttcatgtggttataagtgcagtaaagggaaagatcaggtgccaggaaagagtatttgcattagataaggcagtctccgaggaggtgatgttccagctgggagcagaaactaaggagtggtcagccaagaaatgaattgggaagaatattccaggcttagagaacagcatgtgcaaaaagcaaagagcttggcaagtttggggaacctaaggaaggccagtgaggtcagaatgcagtaaggggaaaggttgaaggaggggcaggagccacgtcaccagagaccttgcaggccaagtaggggaacctggattttatccaaaatgcatagggaagctacaggatttcatcagggaatgacatcatccatttacattttttgaaaggctgctgggtagacactggattggaggggacagaagtggaagggggaggccagtgaggaagcattccctcctggatgaaacataacaaaaaaggaggaaatggctgattctaacagacaaaaccaagcacttccctaaggttgtaacagaccatgccaaggagacacgattcctccatctcaccctcccctttaaggataaaatagaaaaatgcaaactcaatagaaaccaggaagcaaagggacctggagagaccatgcctaatggctcagttccgtgtcttttactccagtttccccagccttccctaatttgtacagtgttcaagagagccctaaggaactgaaagatctggaaccctttcttttgtattggctgaaactcagttcagaaagcagttaatgggtactattaaaataccaaataggttgggcatggtaactcatgcctgtaatcccaacactttgggaggccaaggtgggtggatcacttgagcccaggagtttaagaccagctcaggcaatgtagtgagactccgtctctacaaacaacaacaacaacaacaacaacaacaaaacattaaaaatcagcctgacatggtggtgcatgcctgtgatcccagatacttgggaggctgaggtgggaggatcacttgagcctgggaggtcgaggctgcagtgagccaagattgtgccactgcactccagcctgggtgacagagcaagaccctgtctcaaaaacgaaacaaaacaaaaagcaaataagaaagcagtcagtatatattctggagttatgaatattgggtggcaggcagagcaaatatgaatgtcctcatcatgggaagtagaagaaatatgtgggtggctggcctggctttcttgtttaactatctggaagaagaaagatcatactacagtatatttttttagcctctgctaaactttctcaggtcagctttgattcctagctcttcactcatagtggtaatattgagatatagatactggagaacagcaagaaacataaacataaaacagctccaagaaatgtcttgttagttttgccaacaagttaacttgtgagttaaaaggatataggagggaagaaaggctgcagatctgttgaacatttagcagtacagtcgacccttgaacaacacagggggattggggatgctaaccccctagagtcaaaaatccatttacaactcttgactaccctaaaacctaactaccaatagcctactgttgactggaagccttacagttgattaacatattttgtatgtcatatgcattacgtactgtattctttcaacaaagtatgctagagaaaagaatggtttttgttttgttttgttttgttttttgtttgtttttgagacggagtctccgtctgttgccaggctggagtgcagagctcagctcactgcaacctctacctcccgggttcaagtgattctcctaccttagcctcccgagtggctgggattacaggcatgtaccaccacgcccagctaatttttgtatttttagtagagatggggtttcaccatgttgaccaggctggtctcgatcgcttgacctcatgatccacccacctcggcctccgaaagtgctgggattacaggcgtgagccactgtgcctggccgaaaagaatgttattatgctaagaaaatcataaggaagagaaaatacgtttactattcattaatcaaaagtggatcatcacaaaggtcttcattctcattgtcttcatgttgactaggctgaggaggagtaagaggatgggttggtcttgctgtcttgggtggcagagatggacgaagaggtggaagggaagacaggagaggtggatacagttgtttgaaaaaaatctgcgtataagaggacccacgtagttcaagcttctgttgttcaagggtcatctgtactttattcattcaacaaatatttattgagcaactctctgttccaggcactaagctgagctggtttatctttgttgacctgtggaagagagggaccagcaagcaggcaactagcagccagtgtgaattgcactttgaggtgtacatctatagccagtgtgctgcactgctagcacacaaggggccacctcaccccgacttccacagttcctctgggtagccagcagaggaaatgatgtcgaaattgaaacctgaaggatgagtgtggataagcccggagaggatcctttagggatctagaagtagcccaataggcctggagagtgtatagtttatcccagtatgtttcacttgaactggattcattgatttccaggcttctacaatgtatcgttggttatctttaagtgagacattgtaccttttagtatcttttaagtaaaaatgggcttatttggtaatatgtttagttaatggctctaccatcaccattccctaccaaatctgggttagtaattgtaacgcctacaaaatctgtggcataaattgaacatttttgaaacctgccaaactgaaaggaaggagagtgagtggttgacagtccgaagggaatatgattccatgtgtggtttgagcaaatttacataacttctctgtatctcaggttgtcagtctgtaaaatgggacttaaaccctcattcattctctccttcataaaaaagttgtgggaataatatctggcacatgggaaagcacacttttttttttaagaaagacttggcaaatttgcctgagtcgtgtataaccattggcgcaccagtggggcaccattccccgataagatcaaagcacattgcagactttgtctatggcagtctgttttgaggctaagtagcaacttgaggtgggtaagaaaatgtgcattctagagacagcatgagttcaatgtacaggtaaggtattcaatgtacaggtaaggcagaaggaaggaagggcaaagaaacaattccagggccctggtttctgggatgacaggcttcccaacactcatgccaggactattttccacctcggttcactatgggttttttttctttttttttaatataatgaatttttaaaatgtgtgtttgttgcccagattattccagaaagagttgaagggaggaaaggtgtgcttggtgtgctggtgattctagcactctctccagcctgatttctagtttgtgtggtgcatccagacagctcacccaggtgcccaggctctttctggtatccagagccaacccatccagggcaggagggtgaagattaggaggggcaaaggttagcctggaggttgcaattaacaagaatcaaaatgggtttcaggattctcacacccagttgctaatttcagctggtcctgtagaggtgacacgtagtaggacaacatggttttgggggcagtgctggggtgctggtctctgcttttctagggtagaaaggaatcatacattgaaaatgcttaaatcgatggaatgattttatgttcctcatgcttccatctctttctggtctgcctgctcttcctgccagcccttcactgtgacagtcaccactcctagacctctgtctctaggcatctcccaggaaggagaagtggaaaggaaagagaaaagagctcagtctctggtgcccaagacattgtgcaaaaaaaaaaaaaagatggagtcgaaaactttggtttacacaaaaaattaggaagttattaaatactacaaaggttttatgaaagctcaggcctggtcttgattgttttcccccaacaaacaaagttagggtctaaaggggtcctgaaaaggaaaagtccctcccctggttataccaatgggtggtcttggagtgtgctgtttacactcatataatctttacagtcaggtattggatggcgaggtatctttcaatctactttctagtcaccgattgttcctatgcgtgcattatatagatgacagaactgaggtacagagaagacaaagtcacagagctgctcagtgggtagagccaggactcagactccagagtcatgctcctaaaaccatggtacactgcctcatggtttcactttaccgtggatgaggagcctgagactcagaatttacttgaccaatttattcagttcattattgacataacctcaaccaattttcaaacttcaagtctagcactatattgaatatatccaaagccgagaatcctaaattcggtgagaaaagtaatgtacagaaggaggtggtggtgcttagatataactaaggtaaacatgaaaacttgagcttagaaatggaaactccctgttggcctcctggccatcttccccatgctgtagaataaaaagagatcctttcatttgccttaggatttaggaaagaaagctctttcacttccgttctgtgttccaggaaatagaaggccagatggacggggcttattcttaacagctgttcagtaatcccttcccctctcagccatggcctgtgcagaggaggcacggcctcatttgtaccttctccagattctgtttatgggcccaccagtcagatctcagaggcttagaaaaatccttgaagacagaaattgaaaataaaccactggttccccacaaacagagatgatgacaaaacttcaaagcctgatgcaggggacagtctgatgagacatcaagagcacagtcaggatgcttagaaattcatgacctgtcactgtcctaaggagaagaaatgttcctgttcccatggcggaacacattggccatgtagggcttaaaatttttctctgactccctgggagtatggaggaagagagttatgggaatggtgttagggactgggggtgggagggtggatttaaatggacacacaaaaggcttgcctcccagtgcagtggaatctaaacaatctgaaatagctcaagctcaagagttggcatgtgcttctgagctgccacccactgaacagagcaaggcctgttacacttggagatcccgctccttaaagagaacttgagaagtgaggtggcagaggcttggtttcaaaccacctcgtttgacagtttgcttcagtgaatccagtttttcccttattaccaaaaccaaattacaggggagtttgtctttataacagttaatataactttcttcctttttgcttagaaaatctgggttttctgagattgggaaataatgctttattgcttcagaggaacatggataaaaaaggaagacacgacactcagtagtggattcgccttcgtagggcagagaactttgttaggtgcaggcttagaaccctgcacttagctgtgctgctttgctctggctccggggttcgttttcatgtgctttttcggtttttaagattcatttgtgctcctgtccatgaacaccatcatgctcagcttcttcttttcctattgttgacagagatgtgtgcacagacccaggccatgcagatactggtgcctctaacttcgtcagcccagaacacctcacctctggcccccagcacaggaaagcagcgtggtcaggaggggttaaacttcggctgaagcacaggtaagacgcacggaagttggtgctggcagttcggaaaaagaacccagtccaaaaagccactcagctgctgggagaggagtcgggggcaaggatggtcaggatacaggctgttgagagagaggtaagaggcagaacaaggaggcgagatagaagctcagagtttagaaggatactgatcttattaatggtagtttacgcacaaggttctaaagaactgtaaagttcctgggaggtcattccagggtcccacaaatagtttgattcaaatatcatttcaaaaatacatttataattatttgtaaaactacaatttaaaacatcaaaagtgatacacttatgttttataccttggaaatgatcagtgtgccaaattgtacagcaagactaattcatctttgaactaatcttcatttaaaatttctcggaggaatgtcccaagattccaacgtaagcctaacaaagatttgtagctacttacccatgtgggtcagattttgagagtgaatgaacctgagtgcttcccatgtgctaggtgtcctggctttgcacgggctatctcattaaattctcacaccagccctgtgaggtttgctcttgtagaatagcattcagctaggaggcagtggattcaaattcagcctctacaccaatgcctcagcatcagcacaacagtgcctacttcataggacaactgtaggattcaacgagatacggtattcaaagcactcagcacacagcccactcagaacaaaaaataaatgttaggtggtggtataatgctgtgtgaatataattatcctcatcattctcatcattatcacaaaagtctgtatgatatcatgaatggtagtatgatacggggagtaagatggggtttgtgcagtgtcagactacctaaaattcaagcctagattctgccacttaccatagaccctcagacttgttatagaagctctctctacttccaactgtaaaataagtttaataactgatccgcctcctagggatgctgaaaggactgaaagagccgatacatgtcaagcactagggctgtgcctactatgtcatgagtgcaacaaatgttatcatagtaaccaattatcttgatttcagtttgggaagttctttcatatagacatgtcgacttgcattataaataagtaggctgggctcagtggctcatgcctgtaagcccagagattcaagaccagcctgggcaaaatggcaaaaccctgtctctacaaaaaatataaaaattagctgggcatactggcacacacctgtggtcccaagtactctggaggctgaggtgggaggattgcttgaacctgggaggtcgaggctacagtgagccatgattgagtcactgcgctctagcctgggagacagagcttcaaacaaacaatataatttggatttatgcaaatccatattggtatctttagactatccatgttcaataatacacaaatatacataaaagaaataatgttatataataaaacaacacttgtattggggtgtttaaggttctttgttagatttcatttgaaaaaaaaaaaaagatttaaaagaagtttaaacataccaaaggtctagggaggccaactggctggtgtctgagagtcaggccaagaacagggtgagattcgccaagacctctgactcaagagatccagccagcaaggttgctcccagagacatcctaagaagcagaagctccgaggttatcactctttcctttagcctgctaggatctttaaaatatagagaatcaaaattttctctttaacaaggaggtgtccacagggcccgataggctaatctaatgtcagtgccaaagctcaaggccagaaagtagtagttagggagtttctgctccagcctggaaagaaaatgatcaagacctgaactaaatcaatggtgatgggacaagagatgagacagatttgagataaatttagggaggcagaataaatagcagatgagggtaggataaaggagagaaaaactaaagagtgactgctgagttgctggtatgaggcacttggggatatctgcagggccattaggacagggaaggcaggaatcacagaaactgactgggggttaagaatatcagcagtagaatcacatagacctgggtttgagctagaaacaattaaaatattttataaaacaatccctgaaagttgagtggaacaaacaaatgtatatctacttactatcttaaacataaataaatcatatttataacaagctgggattgtcctcatcagtgtggtcaaagctggccgatggcgctatgtctgtatggagaacataagcgacaagcaatttcctttgtaaaaagtcatgagctagatggtgcagacatcactcctgctcttggctggaatttttactcttcatacactaagaattttacatgtatgtgtcatatctctacaaatacagtcacgtattgcttaatgacagggatacattctgagcaatgtgtcattaagcgattttattgttgctgaacatactagagtgcacttacacaaacctagatggtgtgacctacacacctgggccatttggtgtagcctagactatggtgtagctcttagactatgaacctggacagcatgttgctgtactgaattctgtaggcaattgtcacacaatggtaaggatttgcttgtctaaacagacaaaaatacaatgtaaaagataaaaaggatacacctacatagggcactcaccatgaagggagcctgcaggaatggcagttgctctgggagagtcagcgagtgagtggtgagtgaacgtgaaggccggtactgtgcactgctttactgtacactgaggctacgccaaatttatttaaaattttttcttctataattaacgttagcttactgtaactttataaacttttaaacttttaaaaatatttgactcttttgtattaacacttagtttagaacacagacacattgtatagctatacaaatattttcttttttatatccttatcctaaaagctttttttcattgaatttttttttcttttaaacatttttgttaaaaactgagacacaaacacacactctagcctaggccaaacagagcaggatcatcaataccactggcttctacctttatgtcttgtccctctggaaggtctgcaggggcagtgcatggagctgagctctcctggataacactgccttattcaggaacacctcctgtagaacctgcctgaggctatttcacagttagcttctttttttaataagtgggaatacagaataaaataatgattaaaagtataatatagtaaatacataagccagtaacacacatttattataaagtattatgtactgtacatgattgtatgtactgtacttttagaggactggcaagtgcagtaggtttatgccagcatcaaaaccacgtgagtgatggctacagcttcaccaggcgataggaatttttcagctccattataatcttatggaaccaccgtcataatgtgcactccattgttggctgaaatgtcattatgtggcacatgactgtaaattgtaagccctatgttagtgtacctcctaattttcctgtcccccaagaagtctctctgcaacccaactgttactgatatgggactaacctaggaaatcagagtcattctcatctagttacgctcagatcctacatcctgtttgttttgctttttacttttttgttttgaaatcattgtagactcacagaaaagttgtaaaaatagtacagagatttcctgtatacctgtcacccagctttctctaatgttaacaccctttataaccgtagtacaaatatcaaaactaagaaatcagcactggtgtaatactattagctaacagacttaactttatataaactataaactttactcagatctcaccattctttcccattaatgtcctgtttctgttctaggatcccacattgtgttcccttagcctcctctgatctgtgatatttcctcagtctttccttggcttttgtgaccttgacacttttgaagagctctgggcagatattttgtagaatgcttactatttgggtgtgtctgatgtgttctcatggttacattgaggtgatggcttttgacaataccacagaagtgatgttgttttcttctgtctcatataagggttacatgatgtcaatatgtctcattactggtgatgattaaccttgattacttggttatggtgaagtccgccaggtttttctattttaaagttactatttgtccctttgtaattaataaataaccttggaaagataattttcaggctatggaaatatcctgtttctcctcaaactttcttcactgatcttggcatctatcagtgttgcctgtgacaactattactataatgttctaaatttgattctttatttctttcattttttctacatttattaattagaatttttaaaaaagcctatttctctcctctacttatttattcattattcattcatgtcagtaaggactcttccatatttattttatcctgtgggttataattcagtactactgttatttattttgttgttcaaatggatctagttttggccatcgagagctcttttgagctggctctggtctaagtcctgtttggaaatgtggaaaaggatgaggtagtgatgccttgtccttacacaaaagactgcagaccatgatgtgctatcatcttcttaggagtcttataaatgttgaagtgggaggttgatggtgggtatggagcagttctaatttgtgacatgtcacagaggcctatactgattttggaattggaaagtgctgtggtcacctcatgagctagttccaagtccatgagtaacaggtatatatatattcatagctccttcattgtggagaaaatagccaggaaggatcttctcacttatctataagaaaaaagaaaagccagaagctcatttcccaggtatatataggagccagtgaaacaaccaagttaaacagagagagacacttttagtggtccagggcttaatattctcacagatccaatcccacccttcctttcccgcttagatccctgcattctctcttatctatcaacaggaattcttatgatctaacttatcttggcagaaacttctctctaaaatctatcaagccttgggctagggtaatgagtcggtaaaggagacaaaatgttctagcttgaaactgaagattttccaagccgatgcttttctccataagcttctcattccttcctcaccttctcccacaagtcattataaaaatagtctgatgtaattattaagcatttacccttatatggggatctcggatcaccatgcttcataaagtaaatcaagatgaatggataatagaagctcagaatctgactcctctaattcattctcaattgaacagcaaggttagttctgcggtgctgtcccttggcagtgagttctgtccctgtgctgctgacttagtgttttcatgacagtacatcttaggaagatgcggtgagatgttgttatagaaccactgcttcagtcgactccctaactatgggaggcttaaagcaactagcacttttgtagacagtggcatttttgcatatggaggagggcatgtgtttagcagagaagatcatttaaggagacttcctgatttcagtttgatgcattctatcatcagatgattttccttgcttccctcctcctcttgcccacaaaaatagaattccagcatttctaagctataggctattgttcaagatgccagctcttctcagggagtcattaagggtcaccttctcttcttccctcttacagagcaggaattgaattttaattggccaatttacagaggggactggcattgagagtccctcccacttgcgctgagctgggcaagttcaaggcgattcaggccgtccaactggaggcacatgtagtacttgtgaggcttttaccatgctgtggggagcagaaagagcagtagcagggcagaatggctttttattccacgactgaatatgacatccaattggccagagggttgctatctgggatgtttctatttgccacaaggtaagttcagtattgtgttagaatgcgattcagaatctttcattgcaggatcctccaatgacaagcctttaacagctgtctttttgatattgtgctatatctgtttataaagaaaaataaccaactgcctgttaggtttaaacctgtttctctaaattgttatgaatattctcattatttgaatatctcacatgatttggtgtagtattaatatttctgttcgggaattctcattctcctatgtataaatacagtcgccctattttttatgatgtgtgtatcttgactggctttttatcccattcaaattaacaagtgctttgtgctgtgtacctcacggttttccttcctcatttccctggggaatttcagagtaaccattgctgtttcttatgggaatggttatatacctatgtactagtagccaagttctctattctcattgccaatatttgtataaagaaagggaagtttttattttatttgactttcacttattccttctctgatgcacttcctttttttacacagatctaagtttctgatctatatcattttccttttctctaaagaacttttaatatttcttgcaaggcaagtctattggcaacaaattccctcaatttttgtttacctgagaaagactttacttctttcaacacttttgaagaataatttcacaggatccagaatctatgttggtgttttttgtttgtttgtttttcctttcaacactttcaatcttttactccactctcttctttcttgcatggtttctgaggagaagtcagatgtaattctcatctttgctcccctataggtgaggtgtttttcccatctggcttctttcaggctgtttggctttatctttggttttctgtagtttgaaactgacatacctaggtgtagtttttctggtatttatcttgcttcatgttcttggagcttcctggatctgtggtttggtgtctgacattaatctggggagattctcagtcattattgtttcaagaatttcttttcttcctttccctctttcttttcattctggtatttccattacgtctatgttacaccttttgtagttgtctctcagttcttggatattctgttctggaattttctgtctttttttctccttgcctttcagttttgaaggttttttattcagatatcctcaggcacaaagattctttccttggccctgtccagcatgcatgtgtggggcaggggtatgggcaaggaaatctctgtaccttccactcagctttgatgtgaacctaaaactgctctaaaaaaatttttttaagtctattttttaaaaaaagaagacaaaaggaacccatgtgtatattctaaatttcaaagaaaaggtatagtcttcttattcaactttgagattatagtcatatatgaaaagaagtattgattgagattgccaattgtacattatttaactccatcacaattgaagatttaaatacttcattatattttctcttataattcaaattcaacttttatccatatataatcttgatttgaaattttcctccagaattatgctaaatgtcagcgcttgcttctatagatgcctttacttaaaataggacatggaaaaaaacaggtggatgcaacagtcgtggtaatgttctagctctctagctgatttgagtatttattttattattataggcattcattttattattacaccatgtaaaagataaaaaagacaacatgaactgcttatattatcaaatttgctcatctatatatagagagattacagggctggttttcccagttttatttggcattctttcatctgaaagtgagtaagagagaacgttcttttgatttttattctcccaaagtgtcagcttctgtttgagcagtggtagttaaactcttctctattgtaaaatttcttgtggaaatattggtaggtaggaattgagctggagcaagtgttaaagtcttttacattttcagctgctctgccttaaaaccttcactattctttttatttcagttccagtaacatttggaaactttattttaatgaagtttctttgccagtctgagttgaaaatatagattcttttgagcattatttaacatttttcactaaaattaatgccttctgtcttttcctttgttttcttattgcctctaatttcttacttatggccttttcctttaaatgaagaggaagacagtgaaatagagaagtgaaaaatataacacaaggcatcagacttactccaaaagagaattcagtttgtttggtgttagaggtttgggagggatttgcttttgtttaatggagtggtgtttagaataaataaccatcaaaaggtaaggcttctgcctcacacacacaaatgcaaaaaacacaaccctttcttcatttgttttgaggagtgcaatttaatttattcttggccttgtataaaaattagcttaattttgaaatatgttggttggtatttggactcctttaaactctcaaaggcaatcttttatgggtttctcattaaggaggaaggtttcctgcttaggggtagccttctccgggcactcagcctcaccatctgctggatagaggggagaagctctacaccttttactacaccctgctgagctgctcctcatttgtctgccagcagaagtcctctgggaaagctcccagacatcttctccctaaaaagctatagtaattcaggggcacacacaacatttctagccctctgcagctatctgagcctctctgagatccatgacagtcttgggggtgtttgcatgtgcctgtctgtggaaaataacacaccaccatggaagtgatttctcctaagttttagcaacatatgctatggcacagaaaaacagtatggaagaaaattctaaaatcatatctgatatctggagaaattggtagaaaccatccttctttcctccaacaaataaaatgcccagttccaaatgagagttgagaaacagaaattatttattggtaattagaagttgtgctattctatttatgctgtgctgttcttttgtaattgagtttgtaaattaataaaaggcaaagatgaatgctattacacatcatagatattacaatgtttgcatcaaattctgcttgatttttatgcagatgttgacatgtaggaaggacagttgaatattctgattctctgtgtgtgtcattgctgacaaaggggatataaagaggggaatattggggaaaaaaacatttcaatttgttaccccccggcaattgaatgaaaaacacccctgttgctagtccctctcttttatagtagtgttttcatgcagtaatcaataaaatttaatcttcaaaaactgtttcagaatggaggatggggaggagataactagtagtgaaggggatattgggacaggcatggtagaatggggtaaagtaggatacgagaaaaggggctgtatcttttatgccagttttggtgttacagcgttatgactgcacattagcagacttcacacttactgatgcttcagctgtcaaaaccaaaagtccccaggacatattatcaggatgtgacatttaaaaacaacttttctttccagaagggactgtgtgttgctatgagatggtattacctaatgcatacctttctacctactgaaccactttttaaagacacagatattaatgagggaattatgaaaagccttggaaaagtgttttttaggtttttttttttttttttttttttttttttgtgaatccaaaaggtctgagggatagtcttgaggagcctggaagtagttatagaaacaaggagttggccgggtgcagtggttcaggcctgtaatccctttgctaatggagtgttgaaggacaatggccaccttttttcgtgttttgaaagattcttgtttgtttcaaatcttttaaaaatgcttcagaccttttctgtctcctgtgaacatattataaacatctaaacaccatctgaatgaaacaatgttatgagtgcagctcagtgttttttgacttggtcccagttttccattgctatatgtttttatcattagtatttggggcctatcattttcctataaacagtaaatgcctaaaaagggatgttgttcaaatatgcatcatctattattctatactaaagaagatataatctctccctgaattctttctttttttttttttttttgaggcagagtctcgttctgttgcccaggctggagtgcagtggtgcaatctcagctcattgcaacctcgcctcccggagtcaagcgattctcctgcctcagccttctgagtagctaggattacaggcacgcaccaccacaccccgctaatttttgtatttttactagagacggggtttcaccatgttggtcaggctggtcttgaactcctgacctcgtggtccgcccacctcggcctcccaaagtgctgagattacaggcctgagtcaccacgcccggcctccccccgaattatttctacagtgacatttaattgttcatattgagtttatttcctttttaaaatgtgaaagggggcaatttagcagtaattatcaaaattggaagtgcatttaccctttgagccagcaactccacttttaagaatttctccagcactttgggaggccgaggcgggcggatcaagaggtcaggagatcgagaccatcccggctaaaacggtgaaaccccgtctctactaaaaatacaaaaaattagccgggcgtagtggcgggcgcctgtagtcccagctacttgggaggctgaggcaggagaatggcgtgaacccgggaggcggagcttgcagtgagccgagatcccgccactgcactccagcctgggtgacagagcgagactccgtctcaaaaaaaaaaaaagaatttctgcagacatttcaacatacatagaaaacactatgtggacatggttattcattgcagcattatttgtaatagcaaaagactagacatgaaaaagtgtctacaaaaggggtctggttaaacaaatatatgcatacggtggagtactaggtagctgaaaggaaataaaggtatgaggaagctctgtaaatactggtatagaatgatcttcaatatgtttgagggcttttatttgagaagggggtctcagttttgcccaggctgatcataaactcctgagctcaagcaattctaccacctcagactttcaagtagctgggactacaggcgtgagccaccatgcccagctgaatatgtattgttgagtaaaaaagcaagggatagaacaggccatgaagtttcttttgggaaaggagtgaaatgagattatatgttcatgtttgcctgtatttgcataacagaacactggaaaagatacttaagaaattaactacagtggttagcttgtaggggcaagagaaatgggtgtggtggaggaggaataccagaagtaaatatggggaaaatatgaagactttataaactttataaattttgatgatgcatacatggttatttatattaatccagatacatttatatatgtttaaaatgtttcataagcaaggcataggggtacgtgctatagtcctagctacttaggaggctgtgatgggaggattgtttgagcccaggagttcaaggctgcagtacgctatgatcatgccactgcactccagcttgggtgacagagtgagaccctgcctcaaaaaacgatttcataattttaaaaatacatgaggaaaaatggggaaaaacagcagtggcatgtaaaaagaatctttaaaaacaatgctttactattcacaatagcaaagacatggaatcatcctaaagggccatcaatgacagattggataaagaaaatgtgctacctatacaccatggaatactatgcagccgtaaaaaagaatgagataatgtcttttgcaggaacatggatggagctggaggccattatccttagcaaactaacgcaggaacagaagaccaaattctgcatgttctcataagtgggagctaaatgatgagaacacatggacatatggaagggaacaacacacactggggcctacttgagggtgaagggtaggaggagagagaagatcagaaaacataactattgggtactaggcttagtgcctgggtgatggaataatctatataacacccccagtccatgacacaagcttacctatataacaaacctgcatgtgtacccctaaaattaaagttaaaaaaaaaaccagtgctttatccccagctaagcacagtgttcaataagaatatgatgaagatctacaattcaaatatttgaaattttaatttaatagacctaatttgcagaatatattgatgtattttgtttcttttttgggggatatgggggtgtttgattagaactttcttatgatggactttgtctcatagtattgcgcactaaacaataatggatggagaggttgatgggttagtaaggggtttaagaaatatggtaacttttattttgtggtgctggtagtctgagtatattttgtattcttatacacttgactcgggtccagttgataactggcagagttttataacactgcaccgagaagagcccatgcaacatgtgtcataacagttcgttaaagaatagcatcaacaaaaaaattagttcttagaattttttattttccaactaatagttgtcactttctccatttatccaaagcataccaatctttcaaggtcatctgaagtcccactgtactactaagccttctggctgacttcagaccccattcatgtgagctttttgtatccaaaatgcctctacagcctcggtggcccaatatgatctgaattttataccatctgctcttcactcacaaggctctggctatactctcttgtattctttaaaaacccaaactcattcctcctctcaaggattttgcattcatttttcctttggagctatatattcttctcctagctctttgcatggttaattatttcttatcatttaggtcttggtttgaatgtcacttgctcatagaggctgtctctgacttaaatggggactttccatcacactctcacattacccagttttatttccttcagaacccttataactatatgagaatatcttgtttgatttgcttacttgcttactccctgtctccctcctctgcctctcccacctcattgcacagtgctccttacttgcaaattaaaagcacaggctctggagagagatgcctgggtttagtagctgtgctgctcactacatttgtgacagtgaacacattgtttattctgtatttacctcactttcctcattaatagtcctgtatcataaaggtaatataaaggctaagtgagaaaatactcgtcaagtgcctagaatggtggttggcactcagtaggcactcaaatattttttgagtgaatgaatgatgctctgactttgtttaatagtttttcttgcatctgagcctccccagcaagattataaactcttaggccttccaagaccttgcagagctccaactataatttaacaaggttgaaggcacataggtgattagtgaatactgcttaaaatactgaacttactgtagatttctcagaaacttgttttgcattcctgaatctctctgtgttagggcaaaatcatctaagaaggacatcatgtcacttgcgaattccagtttcatcagcctacccatcccacgcagttaagcttccttgtttgtggttaggaatgcaacaaaagggctttgtttgaattacacccacacacaaaacttagtttgctaaattttaaaattaaaccatcttctgacttactgatatgctcatgatgtgatgtactttaggaaaatatttctttaagttcttaaagatcaaagtgatcccaaaatgtaaaattagtatgccatgctctttaggaatgcttattaaatgtttcgcatcattgagaaagtcagctgtttaactgaaaaaatagctgtttaattttttttttttaactctcaagctacagtgaattgtattttcaaaatgaaagactattttaaaaatactttgcttttcaataggtaatacatgcgtatagtataaaatttgaaaagttacaaaatgaaatacagtgaaaataagttttccttcccagaggcagtcattgtatctagtttcttaagtgtccttccaaaactactctttacgttaatatacacacatgtgattttccccacatactgtagcagactgtacatgtaattctgcatctttccagtgtaacaatatatttggagatatttccatatcagtatgtatagagatacttcatcctttttaacagccattatatggatataccacactgagttaactagtctgctgctaatgggcatttaggttgtcttccaatcttttgatgggtatgttattttaaaaatcatttgctagatgttgtcaaactggccttcattcaggttgtactgatatacactggtgggctatttttggtcatccttttcaattcttcgcttatttcatcacttacctcctatctgtacggtatggaagaatcttataaaacaaagatttatctccgaagccctctcccaacatatcttctgcatctaaaagaaaagttgttttttgtttttttttcctcgtgtttttgtttttttcagggccttttgatttgcttccccctccccacccccaccgccaaaatcatcctgtcatcttgttcttaatctattagaactgtgatgaaacctgatactctgcccagggcaaataaatagttacctctccaacctcctccaaagtaaaagctccaaagttgagtttgctgtctttgtattgcaggtattggacctactttctaaagcacttattttatctgtactgtaggaattatttcatttgctctttcctgcagaatgtaagctccttaaaggcagagacaatatcttagtcattatttctttaaaatatctctttaaaatttgtttaattttttattttcttaaatggacatttaattgtacatatttatggggtacataatgatgtttcagtacaaataatgtatagtgatgagataaggataattaaatatttttaaatatcagtttcaactcttctagtcctcatgtaccacatccctggagcccgatcccgtgtgtcacctccctcacttctccctcttccaggttaggttcatcatgaaaacagaggacattgggtacgaggtcccctcaacttttcgtgctacctacttgctttcacatttgccagcatccacctttcttctatctcaacagcactggctttcctcctccataagctcatacccttcacctgagtgtttgaatcccatcccttcctgagtctttaaggagtcctcctcctgtgtcctgtgtcttcagatgggcctctgcacgctctctgccttatagacacttgcttgaacttctcatttaaaacaaaaacattaggaacaaaaccttttcactccctggatcccttcagtcttctagctaccaccctcttctcccctttagaaacaggtttttgaaggaatcatctgcccatactgcctgtcttatcccttgttcacctttagccccatcctaaagcatgccattgcaaggacttgctagttgccaaatccagtggccatgcatctaccctcatcacactaacctctttacagcattgcagtggttgacagtttcctcctcctcctcactctccccactagaaatctgtgagactcccatacttaacttgttttcctcctccttctgtggaagctcctcttgggctttttcccaggctccctctcccctaaattttgatcattctcagagactcatccttaaatcatttcctttgtctccctgttcattctcctcaagtcacttatcttctctcaaaggccctgtgttttgtgacttgtaaatttctatatgcagcccagccctcagtcctctagtccttctccactgaaagtcccacaggcactcattcgcatgccccagaatgagccatcagcatcctgcttatttcctcttctctctctccactcccatcccctccatctaaaaaaaaaaaaaaaaaaaaaatttaagagactgtctctctggaagctgcaatgcagtggcacacagtcattgctcgctacagcttcaaactcctgggttcaagtgattctcctgcttcagcctctgagtagtggggactacaggtggatgccaccacacccagctaattaaaaaaaaaattgagccccctgcctcagcctcccaagtaactcagcttataggcacaagcaaactagagggcctatctggaacccctgaagttatcagtaaacgttgtctcacacctcatctccttgacaggaagacatcttttttcctgtggagcctgtggaatttatcactttctatttctcttgggtgggaaaatcttctcggcatctagctaggcatggacagatactgttgggtgatgatgccactgaagagccgtccttagtgtcacgtggtgctggtctgaggtcacggtccattggtgtccattggcttctcaaggccaatacccagtcccggggctaatttctactactgagagtgattctgccaactcccttcactaagtagtgggaatgagcagtaggaagatgacagtttgttctttctcttctttctcctaatgtattttgggcccactggggtctaaaatgatacatacatgaaacacctctaggtatctcatgcaaaagagactttattttttctttgaggctgggcttttgctatgtgattaagcagtggcatttgttgagtacctgaagtcatatataactgggtttaaacccttactcccagacttactagctgtgtgatttgggccagcccctgaagggtttagagcactaggaaggatttctaatcattggatggaacaaggtgataaaccaggaatctaagtcagtgaggcagcctaccttcaaggaaccggttgaagatgcagcagcctaatttctggggactttggtgtccaaaattagagaaggactagcagcaagaatactgaactgctaagatgctgagccatgaaccctcaggctccctgcctacctgcactgagaaaaaggttgattcggccgggcacggtggctcacgcctgtaattccagcaccttgggaggccaaagtgggcagatcacaaggtcaggagttcaagaccagcctggccaatatggtgaaagcctgtctctactaaaaatacaaaaaattagccaggcatggtggcacagcctgtaatcccagctacttgggaggctgaggcaggagaactgcttgaacccaggaggtggaagttgcagtgagccaagattgtgccattgcactccagcctgggcgatagagcaagactccatctcaaaaaaaaaggttgattcaactttagaaggccaaggtgggcggatcacttgaggccaggagtttgagaccagcctggctgacatggtgaaaccccgtctctaccaaaaaaaaaagaaatgcaagaaaaataataattagccagtcatggtggcgtgtgcctgtagtcccagcctcctactcaggatgctgaggtacaagaatcacttgaacctgggaggcagaggttgcagtgagccaagattgcgccactgcactccaacctgggcagcagtgctgaacttcaaggtttagtggttacatgggacctgttattgaagattagagaggtatggtgatatggtttggctgtgtccccaacaaaatctcatctttaattcccacgtgttgtgggagggacccggtgggaggtaattgaatgatggaggcaagtctttcccatgctgttctcatgatagtgaataagtctcatgagatctaggttttaaaaagaggagttcccctgcaaatgctctctctctctttgcctgcttccatccatgtaagatgtgacttgctgctccttgccttctgccatgattgtgaggcctctccctaagccatgtggaagtgtgagtccattagacctctttcttttgtaaattgcccagtctcaggtatgtctttatcagcagcgtgagaatgaactaatacatgtggggacaaggaggcaaacaaattgtcatatgttggttctgctgttgatgtcttgattttgcatctacttcatctccttagcccaagctgtgcacctgctcccttttgttcctttatagtttccaggtgggtgaggtctgtttctttttggcctatgtttacccccgtgatttcaggtcacagccactgctctgatggctcccttcctcaccaccatggccagggtccgaaaggctgtgaccatggtaagtctcaggccaggctctgtcataattattgactcaatacctcactggggagctcggggcaatacctcactggggagctcggggctgggcgcctcatcagcaccagcagttcctgcccattcttgtctccctcatcatttaccatccttctttttaaagatctctgaaggcttgtctccctaccctgtctactattcatcaacttattagtaatgaatgatggtaataagacttaacatttattgagctcttactatgggccaggtgtgttttctcatttttaatctcacaaaactccgtcaataggttctactataatctgcccttcattgataaggaaactcagggtgattacgaaatttacctgagatctaaaagctaaaaccagtggtattcagtttaaatctggattagaacccaggtttttcttatctcagagctggtacccttagctacattccagcctctctccctctcttgagagggagttgaatttttctcacttttcctgacctatttggcaactcaagcattagtccacctgactacagactccttcaattcagtaaatctttgttgactgactgtttgaaaaaaaaaaatttgtgtatttgtttcccttgcttcacacaagaacattttcctatcaccctaatctctaaggagttgaagtatatgtttgtgttttgttttgtttttaagtcatcatctattttgggaagctcttcagtgtctgctatatttttaaagttattttagattaagatgcagttaatccagcctctgattaatcttctgactttctagatgagcaaaggcttagctaagaaggggaagtaactcacataaggtcagacagcaagttaataacgaagtcagggcaagagcccaggtctcctgacacctggtctagtatttttctgatgtcctaatacattaaattttattagcttcaggggaattatttttcatttatattacaaaaactaatttattttttcacagaaaagagataggtgcatttttagctacaaggccaagtacaatgagttggaataatttacagctattattttcaccatatccagatggattcctggatcccataaaagtgtttctaaactgcagaaaaatccccctacagtcttacagttcaagaattttcagcatgaaatgcctggtagattacctgactttttttgccaaaaataaggcacagcagctctctcctgactctgactttctatagtccttactgaattatagtccttactgaattcattcttcagtgttgcagtctgaaggacacccacattttctctttgtctttgtcaattctttgtgttgtaagggcaggatgtttaaaagttgaagtcattgacttgcaaaatgagaaatttcagagggcattttgttctctagaccatgtagcttagagcagtgttcacactgaggttgctgctaatgtttctgcagttcttaccaatagtatcatttacccagcaacaggatatgatagaggacttcgaaaaccccagaaaatgttttgccatatatccaaagccctttgggaaatggaaaggaattgcgggctcccatttttatatatggatagatagagaccaagaaagaccaaggcaactccatgtgctttacattaataaagtacaaaatgttaacatgtaggaagtctaggcgaagtttatgtgagaattctttacactaattttgcaacattttaatgcaagtctgaaattatgtcaaaataagtaaaaatttttacaagttaagcagagaataacaatgattagtcagagaaataagtagcaaaatcttcttctcagtattgacttggttgcttttcaatctctgaggacacagcagtcttcgcttccaaatccacaagtcacatcagtgaggagactcagctgagactttggctaatgttggggggtccctcctgtgtctccccaggcgcagtgagcctgcaggccgacctcactcgtggcacacaactaaatctggggagaagcaacccgatgccagcatgatgcagatatctcagggtatgatcggccctccttggcaccaaagctaccattccaggtaagtggctatagctgagactgaagggtttctttctttctaatgtcatgttcccagaaaagaatgttttcttctctgttttgagaatgttttttcttatactcacactaaatattaaatctctatccactgcttttctcatcctcttatagtgcttgacgtgtatatgagttacctttatatgcttggctagatcaacttgaagatcagaattatttgaagcactggctggccatttgagatatttatggggtccatcaattctcagacatttctccactgatagcactatattagaaaaattgagatttttcttccttcagtgcttaagtgtgctttctgccttagtcaaaaccgtatccatttttattcctgtgtttgaactccccatttggttttgctctttcaattaaggtaatttgtccatcttagctccaacggcacaactaatgtactgaggaccactcagtgtatacattatctcatgtagtgactcatagacttctttaaaacagatacagtagtattaaccccattttgcagaataggaaattgaagcttgcggctgggtgcagtggcttatgcctgtaatcccagcactttgggaggccaaggagggcggatcacctgaggtcaggagttcaagaccagcctggccaacacggtgaaaccctgtctctactaaaaatacaaaaattagccaggtgtggtggcatgaacctgtaatcccagctactcgggaggctgaggcagaagaatcgcttgaacccgggaggtggaggttgcagtgagctcagatcacgccactgcactccaacctgggtgacagagtaagacttcatctcaaaaaaaaaacaaacaaacaaacaaacagaaatttaagcttggaaagattagtttgtccaagctcaaacaactgatcagtacccaagtcaagacaaatccaagccaggtttcaaagctgctgcatgtaatcagtaggttatacttcctctgcttttctagctactgtttgttgtatgggtcaaggtttggtcaggaagaaggagagccctcacaagtggtttaggagaggggttatagaacgagggagcacagcctgaccaccatcacacattagagagagaactaagccaggactcccctccacttcagacttggaacccctacaaactggaatctatcttctgatcccagggagttagactccgtagcttatcacttttgggaaatgcttagatagcgctaatgtagcgaggtcaggaaaataagggtcacttagtccttacatacaaaggagacgcaagtgttggtatgtgtgtgcatgtgtgttggggggaggaggggaggctggaagcttctggaaggattacttaatgaacagatggtagctatgcatttggcaaggccagaactcagtcacagcccttaatactcatgtctggtcaagtcaagggccaaatcctagacctctcactgatgaacagtagctcatggaattgaacaggacaaacctctctcagcatatcagggtaggattcaggccacaggaagagataatgtcctggttccttcctggttacagatgctcctctcccttgcccatgtccttcccaatcaccctgaaagaaattattctcaccgtctgagccatctgttctcagagagcaggtttcctagcagtgtctcctgacccttgacaaagccagactacttttgctttacaggcatggaggtgttgagggcctttagaaggtaaggtgtgtggagcctaacaatgaaggaagaatagcatagtggtaagggactgggcctttaagtcagacctaggtttaaatctccccttacccctacggtgtaagcttgagcaaatcatttaacctttgatcttggcttccttttctgtaaaataactagtacctacatcattggattgttgtgaggattatataaaatagcatatgtgcaattcttagtacatagtaagcactcaatgaatgatgactgattataataattaagctgaagacttcaggacaccatgaaacctggtactgaacttgagggtgaatggccagcacacacttataaatgcaggtgggtatgtattaacagagtgcccttcaacagtggggtcctttgagcatccttactcctaaccttcttatgaagccctaaatccaaagccacactgtgacttaaaaaatgtgctggcccttcagcagagataagcactgcaatcagtacttagaatgactgcttacagtaactatggtgagctccagtaggcctcaggggaatggggccgtcagcaccagaagtacagtattttcaaggctttgcttctgcacctcctccttcctcctctgcatcccagcctccagaggggcttaggcaggtggatctgcccttgtgctgtatctaccactctgtctctctgattgaagcttcaaaattgttcctcctgacataaggaccatcagcacaaaagcactgcatggggacaaaaggagaaaggaaagttcaaataactcaaaatgttacaggcgtgtgcattctctcctgctgcagcacaaaccaccctgtggtgcagcacaaacaaaccatgcctgaggcttgcagctttggcagagggcttgacccccatgctgagttccacctgtgggatctgatcttggcagcggcaggtggagaggtgccccaggtgtgtttctgaggagcacagtggcatctagtggtccagtgtgccacatcagttggctggtatctctctgacagccttagtttaagttccagaaaccaatctcagtcctgaatttatggatctgtttcttgttaagaagcaggcgtaagagggggtgagaggatgagggagagacaggagtgaggtgagagagagagagaaagagaagtatggagagactgaagatgtgtaatttaactgtgagctaggttggatttggaatttcactgaaattgtatttcagctgctttctgtcagacccttgacactctgtttttgctgccctatggaaatctcacccagtggttctaaagtactaaagtactttagaagagactgaaaagttatgtagtctagccccctgacaagaggctgaaatagcagtatcaaatcagtgattcattcattcaacaaatctgtatgagcatccactatgtctcagatgctttgtaggtattgggagtacagtggtgaacaaggcataaaaagccccctgcaccacaattatttgtttcccaaaatgtgttccgtggaataacaatccactagatacttcttagaaaaaaaagtttctgagatcaagtaagtttagaaaacatctcttagttaaattatatatttctcttttagaacaacacatgaaaaatggtttgggagaacaatagtttataaaagactcagaaatcttgcagtaaataaaattgtttagcttatttagctcaatattttccaaacatatttaatcatctaaggaattagtgttctgtgagcacactttaggaaatgttttcatacacttattttgtgctctatgttttaaatattttaaaaatacttttttttttttttttgagatgggtctcactgtgttgcccaggctggggtgcagtgatgcgatcaaggctaactccaacattgacattctgggctcaagcgatcctcccgcctcagcctcccaaagtgctgggattacaggcgtgagccaccgtacctggtagatacctgtgtttaaaagtattttaaacacacaaaatagaatgatattataaaaatacatacatctaccacagaattaaaaagcattttatgttcacttcagttctttaaatattatagatacagtcaaagtctctttcacataaccaaagggatatgatataatgtcaagtagtggtaagtgctgtgaagaaaataaagcagggtaacaggcataaaggagagaagagatgctctttagttagttccaggaggtcctctctgaatgaagtaagagggagtaagccaggtgaagagcactccgggtggtgggagcagtgagtacaaagactctgagaccctgagatgggaataaatttcctgggtttgagtttcaacagggaaactattatgctggagtgcagggagcaagaagaagagcaatagaaaatgaggctggagaagtagccagaccatggtaagaactttgatccactcaagatgcacccctcttgagagtaaggctggctttatgtgagttggaattgttgcaggattgaaaaccttcattccaagttttcttacccatcattaaaagtgccattttggtggcatcaatggcaaaggtaataaaaatgagtatttccagacagcagtggaagaacttgtcctagtgagtgatatcagtgcctgtattccccaggcagcttgggaatggtaattctgaagggacagaaccctctccgggcaggagggaaaatacctaacagaggccttccatgacctttctaccttaggtttgctacaggaaggaacccactatacccttgcactggtctgattagagatatgtgtaacagggatttcatatttatagataccatctatattttaagatatgttaggctgggcacggtggctcacgcctgtaatcccagcactttgggaggccaaggagggtggatcatttgaggtcaggagtttgagacgtgcctggccaacatggtgaaaccccgtctctactaaaaatacaaaaattagctgggcatggtggtacctgcctgtaatcccagctactcgggaggctgaggcaggagaattgcttgaacccgggaggcggtggttgcagtgagccgagattgcgccactgcactccgtcctgggcgacagaccgagactctatcttaaaaaaaaaaaaaaaaaaaaaaaaaaaaaatatatatatatatatatatatatatatatatatattttagtgatggtatcttccccactcgatagtgtttcagttaaccatcagtttatttactttgatttgttgtgtgtgttcctatgttagatttgaattatcctttcaatgaaagactgctaaaattctcagcagttgggaggaggattacctaatgtctcctaccttcatagaaatggtgaatgaaacggcccttatggggttccatttcccctggaagtattagctctaaaaaggaagcagactgggtcatacaggattatccacaaggctgtctagcgcttctttagtaggacctctttatttagaggggaatgaagaaattcagggtagggggtaaaatctttgacatatgctatgccattgagtgccgggtctgatttccctgatctggctggcttgggagctatttccttcctttctcccttgaatttatacctatctgtcccgaagtaggatgcgccattcagtcaactgactttctctgatagagaaaaattacattcttgaggagagctgctgaaagtgtagtctccttttccttaaattccagcacaagttttgactccgaatatggtttttctagtctcaacatattatctggagatattccagccataaagcattatcacatacttgaccaataagacactacatttatttacatgtaatctagaaatagaagaatacatcatgaattttaatagtgttgaaacgcctatccatttaaaaatagaaaatcttgggcaagaacttctagtgatttacccttctttagagaacagtgagtcacaaacatttaaaccacttattccttcatatatgccctccccgtgtgtgtatatatatagagacagagacagacattttttagagcagttttagtttcatagtgaaattgaacaaagtccagagatttcccatatagtccctgtccccatacatgcacagcctcctccattttcagcaacccccaccagagtagtacatttgttacaactgataaacctacattgacacatcataatcacccaaagtccatagtttatattagggttcactgttgctgttgtgcattttgtaggtttggacaaatgtataatgacatgtatccatcattatagtatcgtacagaatactttcactgtcctaaaaatcctctgtgctcgcccattcctccttgcatcgcccctaagacctggcaaccactgatctttttattgtgtccattgttctgccttttccagaatgtcagtcatgtagttggaatcatatggtttgtagccttttcagactggcttttttcatctagtgaaatgcattttagtttctttcatatttttttcatggcttgacagctcttttttttttttttaagtaatgaataacattccattgtgtagatataccacagtttattcacctactgcagaacagccttgttgcttccatgttttggcaattatgaataaaactgctgtaaacatccgtgtgtgggtttttgtgtggacgtgagttttcagttccagtggataaatgccagggaatgtgatcactggatcttatggtaagagtatgtttaattttgtaagaaactgccaaacttcttttaaaagtggctgtgccattttgcattaccacctgcaatgaatgagagtttctcttgctccccatcctcaccagcatttggtattgtcaatgttctggattttggccgttctaataggtgtgtagtggtatcttggttttgtttggttgttttttgtttttgcctatgacagagccctcaggacgtcctgagaacatgttccctagtatcttgttgttttaatttgtaatttcctagtgacttatgatgacagccttttcatttgctttttcaccatctgtatatcttcttaggattggccagtttttaaatcaggttgttttcttattgttgagttttaagtgattttttaaaaacacatatattttgagtttctaagtaattttattttgagacagctttctggagtttacagtgattgatagtctttttcctcttctccagacgggctctgaaaaccatctggaggagcttgtaaatgagaaaatcttgccctcctaaatgtatgaggaggctttgctttggcttttggaagtcatccacaggtgttggaatcccagcaccgaagagcccctgtgattaagccttctcataaagcttccctctccttccctctttccccttagttctgcctctcatgagctttttctgactctaatttctctcattcagctttgtgtttagctttcccaccacaaacaaattgtttctagtgcagttaagattccaggaagattgccagggtgtatccttcaattccataaaaaggaaagatattaactaaaaacatatacatgtgcacacaaagtctccttcacccgtgcctattctcttattaactttttcccctcttcccacaaacagccccagtagacacacagtttcagtctcaatcactcttctacctctctcatttcttggcacatgcaaaatgtcatttccagcatgcagcaaatcacatcaaagtgctgcctgtgcccaaaggccacgtggcttcctctgagctcctcattcctctccttgctagcctgggtgattaattagaggcagataggttagagtgttgggcagttactcctagcgatgacacagaaggaggctgagcaaggcccaaatatggccctttttacccacccttccaaacaccaaacctcttgcacaagagaacatttataagctgggtcctctgcctgtaagcctactaaatgataacagctcagtggtactgactgctttgtctttcttccagctcctctactagtgacctctccaactatgaccatgcttatctaaggcggagccctgaccagtgcagctcccaggggagcatggagagcctggagcccagtggggcatacccaccctgtcatctttcccctgccaagtccaccggcagcattgaccagctcagccacttccataacaagagagactcggcttacagctctttctccaccagttctagcatcctagagtatccacaccctggcatctctggccgggagcgttcaggctccatggacaatacttctgctcgaggtggcctcctcgaagggatgaggcaggcagatattcgctatgtcaagacagtctatgacacccggaggggagtctcagcagagtatgaggtgaactcttcagccctgctgcttcaaggtagggaggcccgagcctcagcaaatggtcagggctatgataaatggtctaatattcctcggggcaagggagtgccacccccatcctggagccagcagtgccccagttccttggagactgccacggacaaccttcctcctaaggtgggtgcacccctgcctccagctcggagtgacagttacgcagcatttcggcaccgtgagcggcccagctcctggtctagccttgatcagaaacggctctgccggcctcaggcaaactctttaggctccctgaagtctccattcatagaggagcagctgcatactgtgctggagaagagtccagagaacagccccccagtgaagcccaagcataactatacccagaaggcccaacctggccaacctctgctgccgaccagcatctacccggtaccttccctggagccacactttgcccaggtgcctcagccttctgtgagtagcaacggtatgctctaccctgcactggccaaggagagtggatacatagcccctcagggagcatgcaacaagatggctaccattgatgagaatgggaaccagaatggatctggcaggcctgggtttgccttctgccagcccttagaacatgacttgctgtccccagtggagaagaaaccagaagctacagccaagtatgtcccctccaaagtccatttctgttcagtgcctgaaaatgaggaggatgcctccctgaagagacatctcacacctccccaaggcaacagcccacattccaatgagagaaagagcacccacagtaacaaaccatcttctcatccccacagcctcaaatgccctcaggctcaggcctggcaagcgggtgaagacaagagatcttccaggctctcagagccctgggagggcgatttccaggaagaccacaatgccaacctctggaggaggctggagagagaaggcctaggccagagcctgtcaggcaactttggcaagaccaagtcagccttctcatctctccagaacattcctgagagtctgagaagacacagcagcctggagctaggccggggaacccaggagggttaccccgggggcaggcccacctgtgcagtcaacaccaaggcagaagaccctgggaggaaagccgctcctgacctcgggagccatctggaccggcaggtttcctacccgcggcccgaggggaggaccggtgcctcggcttctttcaacagcacagacccaagtcccgaagagccgcctgccccctcgcacccgcacacatccagtctgggccggagggggcccggcccaggcagcgcctcggctcttcagggctttcagtacgggaagccccactgctcggtgctggagaaggtctccaaattcgagcagcgagagcaagggagccagagaccgagtgtgggcggctctggttttggccataactataggccccacaggaccgtctcaacttccagtacttctgggaatgacttcgaggagacaaaagcacacattcgtttctctgagtcagctgaacccctaggcaacggggagcagcacttcaaaaacggggagctgaagttggaagaggcttcccggcagccctgcggtcagcagctgagcggaggagcgtcggacagcggccgtggcccccagaggccggacgctcggctcctccgtagccagagcaccttccagctctccagcgagccagagagggagcccgagtggcgggacaggcccggctcgcccgaatcgcccctgctggatgcccccttcagccgcgcctaccggaacagcatcaaggacgcacagtcccgtgtcttgggggccacctcctttcgacgtcgagacctggagctgggggcgcccgtggcgtcgaggtcctggcggccacggccttcctcggcccacgtggggctgcggagccccgaggcgtcggcctccgcctccccgcacacgccccgggagcggcacagcgtgacccctgctgagggcgacctggccaggcccgtgccccctgccgcccggagaggtgctcgccggcgcctgactcccgagcagaagaagcgctcctactcggagcccgagaagatgaacgaggtggggatcgtggaggaggccgaaccggcacccctgggcccgcagagaaatgggatgcgtttcccggagagcagcgtggccgaccggcgccgtctcttcgagcgcgatggcaaggcctgctccacgctcagcctgtcggggcccgagctgaagcagttccagcagagcgccctggcggactacatccagcgcaagaccggcaagcggcctacctccgccgccggctgcagcctccaggagcccgggccactgcgtgagcgcgcccagagtgcctacctccagcccggccccgcggcgctcgaaggctccggcctcgcctcggcctccagcttgagctcactgcgggagcccagcctgcagccccgcagggaggccacgctcctgccggccacagttgcagaaacccagcaggctccccgagatcgcagcagctccttcgccggtggccgccgcctcggggaacggcgacgcggggacctgcttagcggagcaaacggtggaacaaggggcacccagagaggggatgagacccccagggagccatcctcctggggggccagggccgggaagtccatgtcggccgaggacctgctggaacgctcggacgtccttgcgggccctgtccatgtgaggtccaggtcatctcccgccaccgcagacaagcgccaggtacgtgcaaccagcaagtcctggcctcgaactgtcccttcctccctagaagctttagtggggctccccaaccccccacactctcacccgctctcccagttcagttttccttgtgattacagaaaagtagcatttgttttcatgagttgagtttctcaagtgtcccttacctggtttccttataaagatataggtatctagattacgtatgttgttatacagattctctatctatctgtctacctccattttaggaagtcaccacctctcaatggaaaaatgcaaggttaagaaaaattagggattatcttttttgttttttgcttttttttttttaatggattagagtctgggtctgagtattttaaaagttttagctttgcaccctttctgtttctattggactttgcatctacaaaatagctagaatgattgacattgatagtcattggttattgaattcctggccctcagctaagtgtgtggcaggtcctgagctaagtgtaatctacatttattatttcatttaaccctcatgataatcctgtgcagcagagtatattatacatgtcagacccctgtctctcggactcccacctcagctctttctgtgcattatcctggtgaggagagaaaataagaaactcaaaatctcacataaaaggattttctaataaaggcaccaaatgctgcaaggattataaagtactttcccctgaaaattttaagcagtgctgggaatagaagctgagcattctgactcctaggagcctgttaatttccctaattcttagcctatcctcaggcttcacttccactgtagaccaggggcctgcctcatgcttcccttcccaccaaagacaataataggaatcacatacctgttagcacaggggaggaagaactccgctccactctcccctctcagattctgctgttttccctttcagagaagtcagccattcagcaagcatctgtagagcatgtgttgtatgaaaaatgctgtgttacagcatcaaaggatacacaaaaggaaaaaataaggctcatgcctttctggagttcacagttaagcaaggaatacgaccttatatgtataaatctaatatgactagtgaatgctttgggaatagtgatcaataatatgctatggaaaggaaagtgattaattctgaggtgatctgaaagtgcttctcctgaagggaaatgggattttgggccaggatgtaaaagatgggcatgatgacaagagattaggggagaggggatgcattgatgggaagaaaccagttcagacaaagaaagattcagcagttctggctgagaagtttgctgcactctatcacacgcatacagcaacaaatgctacttgctcttaccagtcagatgcttatagggcaggattttacaagtttttgacaaggatttagctctttttcaaaattctcattagggaggcctttctgcctccaaaaacaaagtcatcatggaaatcagttcctctgtatgtgacgattgatccatctctggcctgaaataatgactgcaggaggctaccattttgaactacttgtagcctgagaccttctcatatatttggcaggtctggcctcttcctcagccagcttgaaatcctctctgaaacatgcaaccttctattttcttctcctttaattcctcttcattgcagaacaatagatactagtgatggagcttaagtgcacatcagactcttgcctgtttccttctgagagaaaataccgtcccctcccagatgttttctgtttagaattgtacagaaatattttctcccagtataaatccccgacaaatatagaggcaacttcccataagccttcagtagccttttccttccttcagaatgaacagagctaattcccactccctatcctaccactaacacacatttaaaatccatatatgtaacacacaatttcatttagcttgatggattttagcaacttaactgcatagcagtctagacaccttcctttctctccccgtgtttcaaagaaaataaaaatgcttaggtgaaaaccaaatcattattgtttattccccattagatattgttattttgtcttagaggttggttggatggctatgaatgttattttatctttccccccaaatatttcttaagcctggttgattaagaaataaagctaaaacataggcgttgggagaagtgaagagattcctccaaatcccaattaaatactttgtattatttggaaaactttttagaaagacaagtgaatacaaaacagtacttgggcacccttttcataaagggaatgccatatttagatgttatttaatttggggaatatgcaggcagagagggaaatatttccaaatgaaatacttcttttgtactgctttgctccaacaaatactgaaatttctgaacaatgcatagtctcttatattgtcactgtgccaggactgcattcttgagcttcctccctctcctggtctcctgcacagcagccagaccttagctgactggagaagcatctcatggcaaggcggtctgctccttgcatcctcttcatcatctgccttatttgtagttatgatgagtaaaaaataaaacaaagttactctcaccacataactattgtggttattatatacatatttttcctattgaataaatttcaagaacattatcagtaagcttttgggaaggtttgttaatcaatcatttttctcatccttgctttagagaattctgacaagttaagtgaacttgtagagactgtctgcctgagttaaaaccacaatgtggagtgtgtttctgctgctggcttagttgatgctatctccaacaaatgttgcttgctcttaccagtcagatgctgacagggcaggattttacaagtttttgacaaggatttagctctttttcaaaattctcattagtgaggcctttctgcctccaaaaacaaagtcatcatggaaatcagttcctctgtatgtgacaatcgatccatctctggcctgaaataatgactgcaggaggctaccattttgaactacttgtagcctgagaccttctcatgtatttggcaggtctggcctctcctcagccagcttgaaatcctctctgaaacatgcaaccttctattttcctctcctttaattcctcttcattgcagaacaaatagatattagtgatggagcttaagtgcacatcagactcttgcctgtttccactttctttctgtgagaccttggaaaagttaacctgttaaaagtgggtaggacctgcaaagctatagaaagatagccaacatttctgccttagagacagaaatgtatatctgttcattgcatagatttaaaatatagtagagactataaagagaaacccttggagaaataagattactggtggggatatttcccccggatgctgagttagagacttctctggttctcacagtattttcagggaacttcatgtctgatgtgtaacataatcactatgagatggtgtgacaaacattactgaattgctgaggaaattgctcaatgcatggaaccacagtattggatataggcttgattctgtggaatgcaactcataagtcttttttagcacctttctacaagcacacatttaagcttatacaaaatagaattgactttccacaaaatgtgaagatacaaatagctaacaataatcaaatttttgctgtgtgccagtcattgtactgtgttttataagtataaaattagtcttggctgggtgcagtggtgcacacctgtaatcccagcaccttgggaggccgaggtggctagattgcttgaggccaggagttcgagatcagcctggccaacatggcaaaaacccatctctactaaaaatacaaaaattagctaggcatggtggtgtgcatctgtagtcccagctacttgggagactgaggcacgagaatcgcttgaactcacgaggcagaggttgcagtgagctgagatagcgccacttccctccagcctgggcaacagagcaagactctgtctcaaaaaataaaataaaataaaattattcctcacatctgtgcaatgaggtaaatactattattatctctaagttacagaagaaggaaccaagtcaccaagagggtacaaaatttgcccaaggtagtagagtgaggttttcaccccatactgtctgactgcagagtctttaagtcactataccatgccatctcctgaataaaaagaggctgggaatggggaaacagaggcaagagttaaatgttctatatctgaaaatatcatccaatgaatttatttcattttaacatttattactatttcagtcatgcatcatataatggtcaaggatggaccacatatgtgacagtggtcccataagattataataccatacttttactgtatcttctccatgtttagatacaaaaatacataccattgtattgcaactgcctacagtattcagcacagtaatatgctgtaacaggtttgtagcctaggagcaataggcctataccatatagcctagggatgtagtagtctatgtcatctagtttctgtaagcacactctataatgtttgcacaaggacaaaattgcctaatgatgcatttctcagaacatatccctgttgttaagtgacacatgactgtatttttcacatcagatttttcataaggatttctagttatttttagtagttacttgaaatattctaaagtaggtgaatattgtcttcacatttcatcagtgacagagatattgagataactaacttggaacccaaaacaggaggactgagattcagtagactttagatttacattattattattattattattattattattattattattattattattattttgagacggagtctcgctcagtcacccaggctggagtgcactggcgcaatgtcggctcactgcaagctttgcctcccgggttcacgccattctcctgcctcagcctcctgagtagctcggactacaggcgcccgccaccaggccccggtaattttttttgtacttttggtagagacggggtttcaccacgttagccaggatgatctcgatctcctgacctcatgatctgcctgtctctgcctcccaaagtgctgggatcacaggcgtgagccaccgcgcccgaccaatttacattattaagtatgctaagaactggtgtatttttaagtcaattttgagataattaacaaaaataaatcagacacttaacaagttggtataattctatgcctagtatttttcccatagccactgtttttttttccctgtaattgccataataagcactttgtacttcttaccaatttatagaaaattaagtcttgacagtgaatatatgctcaaagcaagaaatgcaataggaatttatcttccttgggcttgtatcagattgggaagatattttcctttgtcaagtggtattttgattgatagaagattcagagaattctctcaatagtttattactgggtctaattcctttattttatccacatccacataaatagtttaagctcgatattctaggggccaaatcatgtgaatacagaagttatattcattgtcaaaacgaaatgcaaaggatgtaataggatatgaatacatatttatactttactgggttaggcgctcacatgggacctaggcttttccaattaattattggcaaagtagcacattcttgtcaacatagggaaaaatggtgggaaaagacttttaaaggaccataaatttcatggagagcaggaattctcattccctacagtgatatttgagtgaatcagaacacatggaattcatttttctcaagccattcaagtctgattacatccagcccagctgccattcaacctataaagattccatggcaagaccttgggctttgaagagatcatggcttgaatcatagtttctccacttacttaactgtgggcaagatatgtcaccttgctgagctgcaattacataccctgcttccaattgttataaagattaagttacaaaaaaaaagtcaagtgcctaatattccaggcatataatttgttggtgcaaggtacttagcagagtgtctggcacacagtaaatacccagtaccggtagctgcaattattaataatgttcaggggtttgtttcttctgcctgctcccacctttgaccctttctattgcttattagtttctcaaccactaaacaaaaacaatgaggaacggggtgaagagcagttaacccattgggcagggttaaatggcaaaataaattactgaaattaagttagagattatatatggatttaatttttctggtttttgcctgtctcctgtcataaataattgggagtttaatatattatcatcaatggcaacatcatcatcttcatcatggacctgatcacagggaccaaactgtatactatcaaaaactgacaaccctttcaggactccagtatataccctcattaaaacaaaaacaactacccctgaaaaggccccagagttattgatctcacatgtgagtgaactttttcctagaatttattgcacccgattacaatccaaattcatatcttcactaattgtaactaggaacatttgagatttttgcaaaatgtaatagactgtcctttcccgtcatctctcatatttccctattgccatttgaaaagtttggcccattgaattcattgtcttcgttatcctatttcaagtttagcagttgttttgaactccagagataatcgttaggagacttctcttagttaggaaacatccttgttagaggaggcacctggtgagacagactgaagttcaaattctgactctgctttttttttttttttttttttttaaatcttcggcttatctcctgcatcgatgccatgggattatgtaagagtgccaccacgtggcctgacaatagtaggttgccagtaaataggtgttccttctcctttttacctccaccctcttggtaaatttaaacacccgtttattggcagtaatgctgtgcctttcttgtgtttcaaggatgtgcttttggggcaagacagtggctttggtcttgtgaaggatccatgttatttggctggtcctggatctaggtatgtacatgtacttatgatgctctctgcatatgaatgctgctggtgttaaactactcttgttcctttctacaagaaattgaaatgtgatgtcatatagtgtcacatgcttttttgatttgtctaggccatggataacttttttttttagttttattattatactttaagttttagggtacatgtgcacaacgtgcaggtttgttacatatgtatacatgtgccatgttggtgtgctgcacccattaactcgtcatttagcatggagaactttttattttccatttagaaatgattttctttaagaatgacacttgttcaaaataggttttgaacatgtgctactgaggacaaggttgatttggctaaccagtttgacaacagaataattaatggaggtgctattcttgagcgtgccccatggctttcacaaatggggcctcctgtgtggctgatctcatccagctctgtgtgcagagcatcacatctggtgaccacagtgctagggaagaacgggcatttcatgaacagcttcacagaggaaggcaaactgtaagcatcggaggtgaaaaataaagctcaaaatcataactttatacatgtggggatggaaaacagaggaaagtcgtttttttaaaatgccatcaaaatcatatatcctgggtagaaaagtaaaatgagcacttttttagaatttaaaattttgaactgttcacatgggacttaataagtagaaattttcagaaagggtattctctgaaccatgtactctgtatgtagttttaatgcagcattacagagttatctactataatctattattactaatgataatacacctacaccctacctactcctttctacgtttttaagccatttccttaatttttcttacatttcattcaatcattgtttctacattcaccttcttaataacacaacctaattctgtcaagtagaagcagccaacatggtcaggaagtaggtattaattacctgctttctagccaagatcagccttctacatttatatgctcttgctcctatagctgtgttgacaaggaagaaagtattcaaggtgaggttgaggactttggtgagtttgggtgcattaattaaatgctagagacaagggaaaactaacaataaactagagtactgctaaagaaaattggtctgaaatcaaagacgggacgaaacaacaaacaatcaaataaccctatttaaaaatgggcaaaggtaaaaaaaagaacaagatcatgtcctttgcagcaacatggatggagctgaaggccattatcctaagcaaatgaacacagaaacaaaaaaacaaatactgcacgttctcacttacaagtggaagctaagcattaagtacacatggacacaaagaagggaacaatagacactggtgcctatttgagggtggagggtgggaggaaggtgaggattgaaaaaactacctatcaggtactatgcttacctgggtgacaaaattatctttacatcaaaccccagcgtcatgcaatttacccatgtaacaaacctgtacatgtactccttgaacctaaaataaaacttggaaaggaaaaaaataattgaaggtgacaggtgaggggggctgttggttggctcagtggcaatatcgacaatctgagaaacacaggtggcaattttgtggggagggggaaatcttcctcaacaaaattagttctgtgtttaaaaaaaaaaaaaaactttctgagctgtaaaaatgccaaaagaataaatatgacaagcatcgcataccactgaataactgaaatgcttgtcctgttcttcagcaattgacattagcataggtgcagctgcatgcctagtgcttgctgaaaaggatattgataatttcaggacatgtaattctcagctgtcctggggaaaagcataggcatggaaagtgcagccgacaggaaaacatgggagggacttgatcacagatcctgtgctatgaattttgagtactaaaaattctgcttgcagtatatttttctgaccatcacaaccaagaagacacaaaaaagtataacactcttttttttctaaaggcttgcatggtcttttatcatagtcactctgttaatcatagtacgaagacaagagtcacatcaactggacaatattgaaatgtcaaaataatttggaaggtggaatttggaggaatgtgccctctgttctccatgaatgcctattaggatcagtcagttttcctccatgctgacataattctccctgaatacatgaaattcagactttacattagtgctttttaaaaaacataaaatgttctaatttatagaaaagtagagattttgcactgttcaagttttatgagagtttgatgccttcatgggtcacaaagagacaatagttgtcattattatatacttctttcctgttttcaaacattctccactctttttatctccattttaaagaaaaacactagaggataccaatccaactaaattcagacattcacttgttaatttcaaacataaaaatttacttgtctatataaaaatgggcaaaagacttagacatttatccaaagatggcagacacatggccaacaagcattgaaaagatgctcaacaccactaatcatcagagaactcaaaaccacaatgagatgtttacctcacacacattagaatggctgcaattaaaaaaacgaaaaacaaccagtgttggtgaggatatggggaaattagaaaccttgcacactgttagtgggaatgtaaaatggtgcagccgtatgaaaaacagcatggagatctcagaacattaaaaatagaactaccatatgatctggcaatgccacttcagagtatgtgtccaaaaaaattgaaagcagggtctccaagacccatgttcacacccatgttcatagcagctgtatttactattcacaatagccaagaggtggaaacaacccaaatgtctactcatgacagatgattggataaacaaaatgtggtatagccatacaatggaatattactcagccttaaaaaggaaattctgccacatgcttcaacatgacattacgtgaagtgaaatataagccagtcacaaaaagacatactgtataatttcacttgtatgaagtacttaaagtagtcaaattcacacaaaacacaaaatagtgatttccaggggttagtaggagggggaaatggggagttattatttagtgggtacatagttttaggtttgcaagttgtgaaagttctggagatctgtttcacaacagtgtgaacatattaacactactgaacttaaaaatggttaagatgaaattttatgttgttttttctaaccacaattttttaaaaatgctttttctttttttttttaaagcaaaacaaaacaaaggtgagactaattgctctcaaaatccattcttgaatagtaggattcctggatacatatcagcagactctgggtgaccctctcacactctattataaaagggacttgaacaaagtctttttttatcccaaacttcattcctaaaaacacaaaataatcaccacggagaagcattctcaaccaagctaagcatttaccactgatattatcttcaaaaagaaaatgccactttagtatagtttgtgtaaactaaggtcacacaaactaaaaacatcatataaaagtctattgggctggatctttaaaggataagtgctatattattgtatgttttagtgatgtcttcccctttagaaaagcctcaagatataataaataaaataaaggcatctgaattagtcgttaaaacatcagatttcaactgactccacatcctgttaaaggatgctgggtttaaaaacagtttgtatgctacagtctggagagcagctgggcaaaggagacgtcactgttcaacagacatttgctgagggggtacttggtggcaggtactggggatgccaggatggatgagacagaagtgaagagcatccccagcgggaagccaccaggaagtgcagagtggctacacttctctatggagaggttcctggtaaagaaaccatgtctgaatgaaagggactggtcatgggaagggaggggttgcatcagagagagaggtgggccctttattccatcatctgcatctatgtataataaaggaaaaataaaggcatgagaagagctaatttggttctttgccatcttcttccaccacatgctgcattctgtttgcctggcacttggatgatcttgtggcaagccctgtgttattgctctgatgtgggactgagtcaccactccctcagaggagtcagatctgtgagatgaaatgtgccatctgcactccagatccactcacatagccagtcagggaactgcagacagggaatgtacaaatcacggtgggtttgctggagagctttttatcctcacattaactcttgcatagcaggtagtgccacagactcttttttctgttttgttttgtggatttttctcctttagaacacaataacaaaagttttgcgaattgttgggtttttcctcggagtctagcgtacagttgtttaaatcaccatgtactatatttgcttattattgccagcctctttctccagaggtaactgcttattagctccttaggtgagactctccccctcctttttatttttcatcagatgaaatgaaaacactaggagagtaagcaaaagttgtaaataaaaccttcaaattcagcagcccatgcaaatgctttcaaaacagacctcccccgtggggatcgcactgggagagaagaaggcagcattatttttccccagagctgggagctatttcctgaagtagtcctaaaaggggctgaagaaatgtactgtttgtttttatagcctgaagcctgtcctcaaaagctgccttatgttgcatggtgtgtacaggatgtgggggcggtgagagggttaataaaagaaaatgccttgtgaacccagtcattccatgtgacattttcctgtaggaatttatgcctgcctagtactggtttaacttgggtcttcctgtgagcagccagggaagacagtgtgcagtttctgggggaaggaaaagaggtcctccttcctcttaaatgcttttctcatctatgtaaggagcattgggctgcatgtttgcccctttcttcagagctgtaaccctcctgtctgtgtgccgttccaggtcactcagttgttcagaaagaggccaagaagagatgctgccgctcttccaccatctcacccctcgttggggtggttcaggctgcaaagccattggtgattcctccgttcctagtgaatgtcctggaaccctggaccatcagaggcaagccagtaggacaccctgccccaggccaccactggcaggaacgcaagggctggtcacagacaccagggctgcacccctgaccccaattggcacccctctgccttcagccattccctctggctactgctcacaggacggtcagacagggcgacagcctctcccgccctacacccctgccatgatgcacagaagcaatggtcacaccctgacccagcctcccggtccaagaggctgtgagggcgatggcccagagcatggggtagaagagggaacgaggaagagggtctcgctgcctcagtggccacctccttctcgagcaaagtgggcccacgcagccagagaggacagccttcctgaggaatcctcagcccctgattttgcaaacctgaagcactatcaaaaacagcagagtcttccaagtttatgcagcacttctgacccagacacacctcttggggccccgagcactccagggaggatctccctccgaatatctgagtctgtcctgcgggactccccgccacctcatgaggattatgaagacgaagtgtttgtgagggatccgcaccccaaggccacgtccagccccacatttgaacctcttcccccacccccacctcctccaccgagtcaggaaaccccggtgtatagcatggatgacttccctccacctcctccccacactgtatgtgaggcgcagctggacagtgaggatcccgaggggccacgccccaggtgagtgagcagactgggcagctttcccccactaacaggagagtgtcatgccccaggtggcccaggtccttctgctggccacagaagaaccctggcatggagatgtttctatacagctcagctcaggacactgttgatctgtttgcctcaggaggtagttggaccagtgtcattgggtactgaggagtcagggtggcagaaatgaaagctgggacccaaggggcacatttcacttctggggacaggataggcttaggcggtccaagtaaatccctcctccctggatgagttctgaatcagttaggaaataagacaaaagaggagggcatatagaagacaaaaacatcacttttattactgacagagctaacattaaagaatatggcttcagattgtaagtgggtctcttgatactgaacccccaagttaaacagctttacctacctcatcaaaggtcatgttagacacacaaatacacatagatattaatatatacagccttgaggcagcctcagtctcaaaagagaagagagactgggatgtgaatgctcagcttctctttccaaaatcactccatgtccatagggaggaataaagagtagggctcaaggtcagtaatgtttagggaaaacctcttggaagctaggagaatgagaaagaagcattccccaacacatagtccctagaacaagtaatctctcaaaacaccaaaaaaacacattgcctgacagcaccttttgagtggctttctttaaacaccacaagagtgacttactaccactacccctgttaacctagacctttcagaaatctctggaatctaacagcaacattcaccagaactgaattcctagtccatcttcctcaggagatgacaacctcctgaccagctgctgggctcaggagcccctttagagtgctgttgttttctaaagaaggggttgatctcaaatgtgactatctcaccctactcctatgtatatatctatgtatgtttgtgtgtctagcatgacctgtgactaggtaggtaaatgtttttagtttcggggttcagtatcaggagacccacttataatcagaagccatattctttaacattagctctgtcagtaacatgtggaagatgtggaaagctacagccctgatgtggaaagcttctccctcagtctttctccaccctcttatcatcacccttctcttatcactctctctttctctctctctcttttttttttttttttaaatatccctggcagcttcaacaaactttctaaagtgacaattgcaagggaaaggcacatgcctggtgcagcccatgtggtaggtagtcagacactggcttccagactccaaacttctatcaagggttcagaggctgagtccacaccaccctccttcatgagcgttcacgcccaacttgctgggtctcttggtgggcagccagcacccatccagactcaaagcctcagccatgatccagtcagtggaactcagggtttagaaaagaaagtcagtcctgatcctcagaagagttcagaagacatcagaacagaggctttggccaaggaaattgtccaccaagacaaatctctagcagacattttggatccagactccaggctgaagacaacaatggacctgatggaaggtttgtttccccgagatgtgaacttgctgaaggaaaacagtgtaaagaggaaggccatacagagaactgtcagctcttcaggatgtgaaggcaagaggtaagtccctggtgatgtcctcagagagacttacaatcacactccttccatggggatgatgataagtctaggactagttgcctgatgttctcctactgccacagctcctgaaccaagagtgacattttatctcagtcttggaggaatggctctggcagtgaggatgtgggacagatatgcaacaacaaagaaagtaatagtaataattataataattgccattagtacccattgttaacgttgtgtgtcaaacattgtattaatttatttatatcaacattatttaattttcacaagaactttctgaggtggctaccaattttacctccatttacaaatgaggaaactgaagtacagaggaattaagaccatgctcaccaaggtcattgaacatgtgagtgatggcacctggatttgatcacagccccatgactgtgcctgtctccagcaattacacagtgcccccagctcagcaaaggtgtacttgccggttctgtatcagagctgctctggcagagaggccctcagagctcggtgctgggaaaggagcaagtggaagtggtgagcgtggccaacgtcttgccaagactgagaggggaagggctttgtaaggaggagagcctagagaaatagattcgtgtactacactgacccttacctctgaggcattaaggtgggtgttggcgcaaatcctgaaaatcaggaaaggtctgagtaggagcgcactgtctggtttggcccagtccgtgagcctctgcttctgaagctccttgagccagccatgtaacacgtgtcccagtgtgcagtctgtgcttttcatttctcctgggttactgcagtattttcttgcatgttttatttccttaaaagactactatgagaaagactgagtagctttcattttctcttaaattttcagtgaaatctttgtggattgacagtctgggactcagcagttagtggcttccagactaaataaaaacagaacattttatccaaatttgggattgcattttaaaaatttccaactgatcctaactaaattactaacaggaacaccacgtttcattttatgggggagagagaaaggaaagagctatgtgatacttacaagctatttgtcacattgtcagaggctcttctgattcaaggccttaactgtcaccttgtccatttcactgcttttattttcagatttgggaaacagactaattgaggtgaagtgatttatccagggtcatgtctttagcaaacacatactgagcacctacaatgtgcaaggcaatccactgggtactatggggaccccaaagataagatttttgtaggtgtgccagtcagttcaccatgggtggttgcagtatggtcattctgttctctgaccactggctgaaggaccaaagtaacatccttagcaaagtatttcctagcattaccactggaaatatatgtttgctccgtcagtttagaagcagaatggtcatggagcttttgcagcactgagaccttcctggggatttaaaaaaaaaaaaaaaaaggcatgcgccatctcctggtggaaataagcattgtcctgttgggcatgagatggccagtagccattgtgagggttggtcagatgccagagaatcccatttgtaatgcggtggacatatctgaaaacaaaaacaaacaaaaatgtatcagaaaatcttttccctgtctttcaattaactggattaaatgtggtcattgttgcttactgggacagttatcaagcaggaaactagtaaagatgattttttgtgtgtgtggttcctaatttcatagtaaaatgatgggctagatgttaaataatatcacaagattaaataaagttcctctccaagagaatcgtacttccatagagtcatttattcagtgggtaggatatgaattataggctgaaaggcaactcaaatgtggtaaaacagagaactactagatagcaggtttctcaattctgagttttttcttcagccttaaaacatccctattatattatcaatgagtagattttatatcttgtattagttcactgcggaccagcaaactgcagatttcccaggattatatgggatagcaggcacacttgagaaggaaaaattttgtgtgttcaagcaacagtgcatagtaggcactagaaagattacatgtaaccaaaggagtataggaaataattgacctaaaacctgaggtttgtgcagcaccttgaaaatactttcacattgattgagtcatggttccacactgcctttctctgaaataaggagtcagtgtcgttcttatatgaatcacaaaagcagagaggttaaatgtcttctccagagtcagctggcgaggccatagccttgactcccactgtcatccctaatgctgcttttggtggttttccatcccaagtttgcctggcttcaacagccctgtacatagtaatcactcattagttaacagttactagtttatcctaatttctgggaaagaaattaaatagaattgttacgcacttctgaatggactgacatctgcagtgaaacaaagcctctggcgtgatctgtgtggctatactttgtgctctttttggcccaggaatgaagacaaggaagcagtgagcatgttggttaactgccctgcctactacagtgtgtctgctcccaaggctgagctactgaacaaaatcaaagagatgccagcagaagtgaatgaggaagaggaacaggcagatgtcaatgaaaagaaggtaaataaagaatgggatgcccttgttcagctttcctcagaaaaattgacaaggtccatgtaatcagcgtggtgactgggcctcttgaggcaggtggggaaaggacctgtcacatcaccagattgcaccaaaatcattagactttggatttacatggcactttaactaatttcctcttagcttttctgtgagtaggcagggcaggtaagctactgtacttttcgtttttacaaataacagaagtgaagcttagagggattattagaagtctcatagccaggacttgaacccaagtccctagcctcctaatccagcaccaggaccccgacactgttctcagctgctggttggccagtgccaacggtgtgtgtaattttcttgtttcatagtcaaaaggaaaattttaaaatctagaaactttttttagggaaggaggccaattgttaaatgacacttctgagaaaaagtaatattaacctttatatcttccccagccctttttgagggacttcagcgaatagcttgaaagtgcagtgctggaatctagttgttagcatttgatactcctacagagatttcaaatgttaagacacttaaaaaatgaccgtgatgctgctgctgtcttcccacatgccatggagatctaaactgggctgtgtctgcaggggagaaagttctcgccttccactttctctatagcaccagaggggctgccttctgctgtgcttgcagctctctatgcagctcaggcatgtgtgctgcaaaggaaagcttgcttgcttcttgctgagcctggaaggtaagtggttttcagtgatcctgattccaggagaaactttctagggtgattttatttcatttgatctacaatgtgtcccaagctgtcttgtctgttggaatgaaaccacaggatatagaccctaggagcagagggtaactggacaggagggatctttgcagcacctctgggtcatggctaacatgctgatgcaaccattgtagtagcaagctccctgctagcccaaagttttcctatttacatacttgtcattgtatacccctgatatatatacctaccccagcactgctgagcacttcatttaacgggtcccctgattgcaaataagaccacttggcttttggtctgtctatatttatcccaaagagagagctatgtatacacccttacatgtatcacgttgccatggcatctttaactgaacgttttacacaatttttttgttattttgttttctgcctttgggcatacctgctttacagttgcagtgtggcaaatactcattgcttttcctccctatcttaatttttaagtgtttttttttctaagttttattttagaatcggggcataggcaggtttgttacaaaggtatattgcatgatcctgaggcttgctgtatgattgtatgcatcaaccaggtagcgagcatagtacccaataggtagttttttaacctttgtcccctttccttccaaccctcttttattccccagtgtctgctggtcccatatttatgtccatgtgtacccaattaactgttttcccatcactttcaattatcaccctctcactcgaagcattatgtggcaaaaagtatttttagactgagaatatgaagaaatagagaattcatccatcctcacgggaaacaacattaggtagtatgtatttcattccaagtgtgggctatgtatttgattttcttttcaacacaatgctgtactatcttacttgcacaaaactcctctgacacttgtactaccacattttatgctaatcagaattagagaatttaagggctggggtcacacagttaatagatgctaaagtcagatttaaccttatgtctttctgaccccaaagcctgctaaaaattgctcccaggtcagctgcctttaaaccttgctgccctgggaactgagctaaactggaggttctctgggtataactaaccagagctagagtttgagattaaaaccagttaaaacccattttaaaccaaaaatatgagaacagcagtgtccgtgacttgaggactgaggagtttcgagtcatttggagtgccttttgggggagtcacgggcttaggaagacaaaaccccactcagggtggaagagatcttagggagaggaaatgtcacagccacataaccagggcctggcacctagcacgtgctcaataaacatttgtttcatgaagttataaagtgcaaaactcccaagttggagtttaccgtttaactgaagaaaaatatccagaagcccactgtggaaaggttataggattcgagtctatggccttgctatcctcaacacatttgatctcagaagctgaccagggtcaggcctggttagtacttggatgggagatcatggtattagaattcagaagaaaaaaaaatctggaagttaagcaactagtttgtcctttcttgacccttttttcttaataaaatggaagtggtaatgatctctcacataatagttgtggggtcaaattaactgacatatatgaatgtgctttttgagctgcagggtgtaagagcatataatatcttaacagagaagtgtttaaggcaatgtcatgtaagtatgcaaatgttgatggcatctggtatctttcatgttaagatgttcagtgagaaggtgccttattgccaacaaggctaggcactttcctaaatcagactcttacgaggaaaaacagctcacatttgttttctctcttcactgtggaaaatgttgcccacagcaccagggggatgatacccacttgccctgtgggcttatctggctcttcagggataaagaaagatgagaaaaggccatttagttaatgaggcctccacatccagttagaatttccttcggttccttcttccctcaatcctttcttctaaggctgtaagtggcctgagggtttgcatcactttgtgagtgtaaaatgttaggctcataaatgcttagtgagaacacaccttctctgtttcagacactgtgctctgccttgggcatacaaacatgaataagacactgtgtctgctttcctggaactttagactggcaagagaggtggattattttagcactacattattggtcttctgatagacacatggactctactgggggagcccaaaggagcagttcctgactcaagagagtagagtcagattttacctcctccaggaagataaaacctgagatcagcattgaagaatgtatcggtaggagtcaggagcattcgagacaaaaggaaaagcataaggagaaaccaaaagataagaaaaagcatggaatgtgtatgataaagaagggtgcttcaagtagtttgatattttggaatgtaacaaaggctcatgattaaataaaaaatcaccaagcttaagccaggcacagtggctcacacctgtaatcccagcactttgggaggccaaggcaggaggattgctggagcccaggagttcgagaccagcctgagcaatatagtgaaaccctatctctaccaaaaatataaaaaattagccaggtgtgttggcgcacaactgtaatcccagctactcggaaggctgaggcaggaaaattgcttgaacccaggaggcagaggttgcagtgagctgagatcgtgccactgcactccagactgggcgacagagcgagactccatctcaaaaaaaaaaaaattaaaaaactaaaaaattagctgagcatggtggcacacacctgtggtctgagctacttgggaggctgaggtgggaggatcgcttgagcccgacaggcagaggctgcagtgaaccaagatcgtgccactccaatccagcctgagtgacagagtgagaccctgtctcaaaaaagaaaaaaaaattaccaaatttagaaaataacaaaggaaggccacaaacagtgggagatgaggctggaagggttcacaagagccagtaggtcataaggtcatgtagggctttgtgtgaaatgctgaagttcggattttatcatatgacaatggagaaccctttgagattttagtttgttgtaatgaactacaagtttataaatgtgtaattgaattttcattggtatcacttacatttacatatctgatttggaaacacaaagttttaaataagtgatgttgttgaaaacatctttaatatattcagcaaaatgcagttttcttcctgaaatacaacaagcttttctaatgatggtttagaaaaatgatacttggtcaatatccattctccaatattgttttgaggtagaatgtagcctttgaccaacttttgcaaagtaataatttgttatttaatatttaaagttattaataacctaagatatatatctaggctaggaactagagtcttggtttactaataactattttataaattaaaaataacactttagtttcactttgatatttctatttatatatcctagatgatgaataatattccaagtaaatgtaagtatcagttaaaatatgaaacttccattgtctgaacttttgatatacgtaaaactaaagacagtgtaaataatcagagctgtcaattttttggctaaagcctgccttattattaagcaaaattctacttaaaccaatcacataattccctattctgaagtccaacaggctttggcttcagaaacttagaggaatatttcaaaaggcaaaaggaatctattgttcctctgagtcagcttttctcaggagatcactggttctcagctgcccattcccgctgctcttccttcattcctgaagttccagctctccctctggtcttacttcctttcagtatttatttcagaataggtctgctgataacacattcttttagttttctccatctaggaatgtctttattccactgtcacccttgaagggcattttcactggatatgggattctgggttgagttgactcttttctttcagtacttaacaaatgttcactttcctcttgcttccatggtttctaatgagaaatgcacagtcctttaaatattggctcctcctgtatgcaatgtgttgttttcctctggccactctctttcgtctttagcattttgattatgatttggatggacttagttttctttgagttgatcgtatttggggtttgctgagcctcttgattctgtaaatttatgtctttcaccaaattctggaagttttcagccattctgtcttcaaatattcttaatgcattaatcttctccctccaggactttagtgactagtgatacagtatttcaatgacagttcatattgtcccacaagctccattcatttttttttaaatctgttttctttcagtccttcagattggataatttctgttggtctgttttcaagttcactgactttcctatctccattctgccagtgattttttttttttttaatttcaaatattatagttttcagttctaaaatttacatttaaaaaatagtttctatttctttgctgagaaggtctctttttaaagttgttttaaagactcttgtagattctgggcacagtggctcatgcctgtaacccagcacttagggaggccaaggcaggcggatctcttgagtctaagagttcaagaccagcctggccaacatggtgaaaccccatctctacaaaaaaaaaaaaaaaaattagccaagtgtggtaatgcgtgcctgtaatcccagctacctgggacgctgaggtgggaggatcacctgagccggggggttgaggctgtagtgagctgtgattatgccagcaatgcctatatgctagaaatggctttatctcgtcctagtttttacaagctaagctgaattccactctattcctaaatcccaaccacttggctagtagtcctgaattactcttaagacggagacacacagaggccaactgtgtgtgtagagtgacgttactggcgatgtggtcttgtcaggggaaggagtattccccctacagacatctatctaatatgagcggtgtgtcatcttcaaattgttgtctaatcttacgactgcacaaaaaatataattagaatgtgtataatactttcatattttccaaagtgattgcaccagccttcaactcttcaaatttctggcctccatttcaacattcatgacttgagaagtcgaatttctagaaaatgcttttgaaaaactcaacagtggaaagaaacaaggcttttcttttcatcctcatggttttcgttatttctgttatgacttcttttgaaactaatatcatatgttgtggtttccgccagcctcatttgagcctcatagtattcttatgagctattttaataaagtgatgaaagtctgaagccagatgatctgcgtttaagcctggctctgtcacgtaccagctgcatggccttgaacaagttaacctctatcctcctcactttcctcatcggtaaacggggataataataatacctctctcaccgggttgttgcaagtagtaattgaatagtaaaacacttaaatggtgtctggcacagagaaagagctgaataattaattagacattattattagttttcggcaggtgttattttcttctcgctgtggataactgagaaacagaaggtcaagtgacttgcctgatgccgaatgttatgtcagagcctcctgcctccttgtccagtgttcatcctgctgtaggcaggaagtggggaagggtccagaggacatttctgcagaggatgaggtgggaggcagggtctatgaagctatgtttgggggaagaactcgtataaatagcatctcacacagggtgagctaacagtttatgccagatgagaagtggataaatgatttcacaaattaagtagctcctgagagactagtgtgttatttaaaacaaaacacacctcttctccctcccccggtgagttattctggtagacattggtaggttttttggaagagatctgcctggcaaagaaatggctatttagtacagccagctttctcttgctgctgtcagtttctcaaatccctcttaactgcattttaaaattcaaattatcatattttaaggggctcgttagggcttttaaaaaattcaaatgccacctaactgaggaacattcagccaggagtgactgacgtgaccactcagtaattctggccttagcatctgtggctgagccatgagatatcacattagagcccagcaaatattaataactttccaaaatcaggttctttccacagaagcctccctgcatcacttctatacattttcatctcattccgttctttcttgcaccgtgaagcctggggtacacacatgctcctgtgacagatttatttatggttctgcccagcactgatgtctctgaaaaccaaaacagggtctgggaaggaaagatggggttgactggatggttgtgtttgaagcccgattgcagtttggctgggtcaagttattttgacccttccagtccactgaaccatgctcacctcagggccacccctgcagtgttgctgatctgcttaggtgccggagagagctgttgacctgagttcagcagaaaatttgaaaggatgagttctctcctctcatcactcaccaccacatgtgagagcaaactacttatccttggtttctgcccatttgcaaattgataagcatcacacatgtcctttaaaataccagcctctggctgggcgcggtggctcacacctgtaatcccagcactttgggaggccaaggcaggtgaataactgaggtcaggagttcgagaccagcctgaccaacatggtgaaaccccatctctactaaaaatacaaaattagctgggcgtggtggcgggtgccagtaatcccagctactcgggaggctgaggcaggagaatcacttgaacccaggaggcaagagtttgcagtgagccgagatcacgccattgcactccagcctgggcaacaagagtgaaactccatctcaaaaaaacaaaacaacaaaaaaagcagcctctaagagccacaggaggatttttaaatacaatgaggccacatgaaataatagtttaataagggttttagttccttccagaaatgacaacacaccatactagtttcaaaaaaagtcattaatagaaataatgaaaaacaggctgaaaaaaaccaccttgtttctttccactatttggtttttaaaaagcattttctagacattctagaaattctgcttctcaggacatgaggttgaaatggacgcctgaaatttgaatgagctgaaggccttttcctgagggtgcagtgataatgttttgccccagtaactatctctttcaatttggtataacccagttgtctttaagtgtcttccagtaacatctagagcaaaaagcctaggaaatgtacccttcgagttaaaaattcctgggctgacttcacatagatgacattctctctcattatctgtctgaaaaacaggaatgatgacatttgacttgtcttaacccagtccagcaggaatgctgggagacacaacagcatgcagtgtttatttttcctgctgctttgcattccagtgtccttgccattttctccatatgcgctgatatcacagtgaaagatcatcacaccctgccaggcattttgctggaggtatataacatgttctcttgcaggtaaatttcatagcttccagccagaattgcttttttggaaaatgaaatttttccaggtgaagataagaaaacttaaataattaatattaagcaattttaacagcttgaggaaaaccaaagattataacctgtgatgagatggtgcagcagatgtgatttttgagacagagtctcattctgttacccaggctggagtacagtggtgtgatctaggctcactgcaaactccacctctcaggttcaagcgattctcctgcctcagcctcctagtagctggggattacagacgcccaccatcacgcctggctaatttttgtatttttttcagtagagatgggctttcaccattttgaccaggtttgtctcaaactcctgaccacaggtgatccgcccacctcagcctcccaaagtgctgggattacaggcatgagccactgcgcccagcctggatgtgaattttttagccacctgcagcctctaggattaggcagattgagaaaacaacaagatgtcaccattaaagccagaacttagacatttcaaggacattatgaacctcactcacttgtgaagtacctctgatggtccgactccaagataggcagattgtggagaaataaatatttccctagtcattgtgattacattcctaatggaccttctctggtgctgatactgaaatagtacaaaaagttgtcagtacctttcaattctgttggtcaaaaatatgtttttcctttttttgtgtgtgtgttttttttttcctttaaaatgaacatatacttccaacatagaagttgtaacctttatatttaaccaagtttccagttgaagccagtttggggtgtgcatgtgtgtgcatgtgtctatatgcgtgtgtgtgtatatacacacacaccaattatatatatagtatgcatgtgtgtatgtacatacagagaatttttgagctggggcctttttagcagtaaaaaaaaaaaagtaagttttaactaaaaaagattgtcttctttccatctagctattttaggctaagagaaaaatgaaagactaattacaaaaaccgtggagtttaatttctgttgtgcaaaagaagcagtagacaatataaatgaattcaaactagaagccactaagacatttacttccttccttcagttaaatatattgggtatttgcttcactgttttataagtatggaaatatgtgattaaggtgtcaaattgcacagctctggtaactggagacaggggaggtagaacaaggggctgactttctgataaaggtcttgctgtcaatttctaatgattgtacaagggtggcccctaaagtgaggctgacttgagttcacttcacctcacaatgtcttagtttcctcccttattataggtagataaaacagtatctactataagattgctgggaagactaagtaacataatcagtgtagagtttctccatatgtatggcacatatcaactgctctacaaatggtagctacaattaatattcaactcagctctaagaccttgggccaatcccttaattcctctgactcttggcctatttgtaaaataagaatactgtttactctacctgcctacttacccatagtattgtcatgaggatcaaatgagaacatgtcttaaaaggacttttaaaaatgagtaattggccaggcacagtggcttatgcctataatcccagcactttgagaagctgaggctggtggatcacttgaggttaggagttcgagaccagtctggccaacatgatgaaaccccatctctactaaaaatacaaaaattagccaggcgtggtggtgggcacctgtaatcccagctactcaggaggctgaggcaggagaatcgcttgaacccaggaggcagaggattgcagtgagccgagattgaaccattgtactccagcctgggtgacaagagccaaactctgtctcaaaaaaaaaaaaaaaaaaaaaaaaaaacagaagacaaagctgtacatagcatgacacaatggaaaacattacaaggttgtgtgtaatcaagtgttggtgtgtgaggtttagagaaaggcaatggtagacccttagggaaagaaggctattatggcataatattgggggacactccatatagagaagggggaggatattcagctgagccttgaagatgacagaaggtggctgggggaggtgacttctgcttccactggcacctcctgttggctgatctttgcggtcttatctgtcatttcaggctgagctcattggaagtctcacccacaagctggagaccctccaggaggcgaaggggagcctgctcacggacatcaagctcaacaacgccctgggagaagaggtggaggctctgatcagcgagctctgcaagcccaatgagtttgacaagtataggatgttcataggggatttggacaaggtggtcaacctgctgctctccctctcggggcgtctagcccgtgttgagaatgtccttagcggccttggtgaagatgccagtaatgaagaaagggtaggtggcctagtgatgcagttcaacaagttctccctcaaagcccacatacatagagaggcgccattagacgccatcctttctctcaggaagatttgtggcaatctctttggggcagggagagaatacatgtataggtaaccaagaaacagagaaggcattttctgtgttgagatataatgctggccaggcgtggtggctcatacctgtaattccagcattttgggagcccaaggcaggcggatcacctgaggtcaggagttcaagaccagcctggccaacatggtgaaccaacatggtgaaaccctgtctctactaaaaatacaaaaattagccaggcaccatggtgcgtgcttgtaatcccggctactcaggaggctgaggcaggagaatcgcttgaacccgggaggcagaggttgcagtgagccgagatcacgccactgcactccagactgggcgaccacatcaaaaaaaaaaaaagatgtactgctgtactgctgacacttaaggctcatggaattcttgggaaagtaagaaccacaggcaccagagtttctttcctcccaactgtcttccttcctttctttcccaaaaagataaaaacatcatgaatacattaaaacagggagggggcaggaacataggcttaaggctccagggcatctcacatgaggggccacaggcactcagtgaggacgcaccagggtgtctccactgcaccccctcctcgaagggagggtacagggggacaggtaacagtgctgaccccactggagacaattcaccaagagcttccacctgtcaggcactgtgagcttatgcgcagtctcatggaatcctcacaacagcccagtgagggagctaggataggaggagtcctactgcagactccaagttgtatcaccgcattgaacagaattccagagctatagagcattcttcatccactcctctgtacggcaaatagttactgggggtctagcgtgtgtcacttagtggtctaggcacatgggatacatttgtgagcaaagcagacagatcctaccctcctgatactgaacaacaaacagtagacacaattattttatatatatgtgcacacagtatgtgtgtgtatgtgtatatacatgctagaagatggaaactactccagccgtgaagaggggctccttttcttgcctatgctaccatcttttttctttttcttttttttttttttttttgagacagagtctcactccgtcacccaggcttgagtgcagtggcgcaatctaagctcactgcaacctctggctcccgtattcatgccattctcatgcctcggcctcccaagtagctgagattacaggtgcgcaccaccatgcccagctaatttttgtatttttagtagagacggggttttaccatattggccaggctggtctcgaactcctgacctcaggtgatccacctgccttggcctcgcaaagtgctggggttacaggcgtgagccaccatgcccagcctaccataccatctttctttttcattgctctcatgaattctccaataatttctcctaatacattgcattaaaaggaaagaggtcctttttcaaatagattttaaaaggattagaaaaagtctggatcctaaacatttaggaaagtgactcagcatttaggaactctgcagcgccactctcagcatcttcctcgtgtaaatgtgctgagtcagcttccttatctagaaatagtctgatactacctaactcagaagtgtgtcctgtcctcctttcttccactcgacaaacagctaacagtagcctgtcaaatatgaggtgctgtgtctgctggggacaaatgctgactaaaacacaggccctgctctccaggaactcacaacttatggaggaaagcagtatggaggagcaattgtgtgctggtgctgagcataatgagaaactcagccaccaaacacttctcaggtgggggagcgtaaggcaggaaggacttcacgcagtgacacatgaatacagtttagaagaacctcttaattctaagaggactgagaggggaagggcctcaccatttagaagaaataccatagacaaagtcaagaaagagatgccatgtttaagaattgatttgcatgtggtttggtatgtctagaacatacagtgattgcttggttttgtttttaaaaatagtgagctaaggctgggtgcagtggctcacacctgtaatcccagcactttgggaggccaaggggggcagatcatgaggtcaggagttcaagaccagcctggccaacatggcaaaacctcctctctgctaaaaatacaaaaattaaccaggtgtgtggcgggtgcctgtaatcccagctactcaggaggctgaggcaggagaattgcttgaacccgggaagcggaggttgcagtgagccgagatcacaccactgcactccagcccgggtgacagagcaagactgtctcagaaaaaaaaaaaaaaaaaagagctatgggaatattagaaactgacagaaagtacatggccccatcaaaagagataaagaagaaagttcaaagaaggtgtgggaaggattaagggggaaaccaggaaggggtaatgagggctcgccccttgtccctcacccagagctatagcatcagcagcaaagccattatgggcctctttctgaagggacaaggagaagggagccctgatcagaaccatagctgcagctgccctatagcactgaggccctggtaaaagaatgcaactgccaccaactcgaagcctggcacagaggcagccagggatacatgccacagtttcttttcgcactctccagtctcttttccatcactccccttggtcaaacccagacagcaagggagcccagtggatgcaacccctagagttcagcttccttcagcacagggcagagaagagtggacctggagaggcagacacaatatccagcacagaaaatcatcacaaagaccttaccacagtcatacactagactttagacttcagcctataggtagggaagagtcatgaactaactttgtgacttactcagcctggggaggggcaagattgatgttaaaataacagttgggaggctcattttaatagtctaaacaaggagggtttatgctgttgatgtaggcaattgtcctgggggtagagaagaggggataaattagagaatgaatttgtattagcaaggggcatgttagatgaggggaagggtagagcagaaaataattccaagtttcctattgggccacctggatgaatgctctagatatctgagacaagaaagactggagcagtttctagttagggcaagataaattgttttagaaccgaattaaattcaacacttacatgcatgcctgcactcttaaatacaagtaagtttgctcacccaaaaaatactatagcagtattgtttttttatcatgattggtctttgttaagaaactaaaactataagtagaaatgagaaaaggaagaaaaatagttaccaaatggggagtagtgaagaccaggattggggaggagtatctataaggctttaactgaatctctaaaaaaaatttttttaatctgcagccaatatgaaaaaagtgttcatattaagatttggcaccattaatgataggtacacagagtgattctttatacattactgatgtctaaaatattttatatattttttaaggtaggtgatgaaaaaattctcaattttttaacttacatctcaatgatactttgaaaggcatcctcattcaaattcagtccctcagggttttttggggttttttttttgttttttttttttttaaggtatgtttttctgcttagggaaaggaaacttatgccaataagcctgtaattcttcacttttcccccaggcattattatgtaagatgtgacaggctagtttagggggatttagggcaaagacacatgagtctttgataaccctacataagctattttgtattgaggtatacttaagtgatcttatttcttgattgattttcattttaattttccacaatcactttttttttatttcaataggtttttggggaacaggtggtgttttgttacattgataaattcttagtggcgatttctgtgattttggtgcctccatcacccgagcactgtacactgtacccgatgtgtagtcttttatccctcacccacctcccacccttcccgctgagtccccgaagtcctttgtatccttcttatgcctttgcatcctcaatagcttagcatccacttaaaactgagaacataaaacgtttggttttccattcctgagtcacttcacttagaataatggtctccaactccatccaggttgctgtaaatgccattattttgttcttttttatggctgagtagtagtccatggggtgtgtgtgtgtgtgtgtgtgtaaaccacaatgtgataccaccttactcctgcaagaatggcaataaaaaaaaatacatgttggcatggatgtggtgaaaagggaacacttttacactgctggtgggaatgtaaactagtacaaccactatggaaaacagtatggagattccttaaagaactaaaagtacatctatcatttgatccagcagtcccactactgggtatctatccagaggaaagaagtaattatatggaaaagacacttgcacactcatatttatagcagtacaatttgcaactgcaaaaaagggaaccagcccaaatgcccatcaattaacaagtgaataaagaaaatgtgtgtgtgtgtatatatacataacatatttgtatatgtgtatatacacatatatacacatactatatatatacacacaccatatatatgtgtacatacacatatatacacatatatatacacacatactatatatatacacacacacacacacatacatatatacacacataccacattttctttatccacttgttaattgatgggcatttgggctggttcccttttttgcagttgcaaattgtgctgctataaacatgggtgtgcaagtttcttttccatataattacttcttttctctggatagatacccagtagtgggattgcaggatcaaatgatagatgtacttttcattctttaaggaatctccatactgttttccatagtggttgtgctagtttacatccccaccagcaatgtaaaagtgttcccttttcaccatatccatgccaacatatattagtttttgattatggccattcttgcaggagtaaggtggtattgcattgtggttttgatttgcatttccctgatagaactgttcagcagtttttcacgtttgttgaccatttgtccatcttcttttgagaattgtctattaatgtcctttgcccactttttgatgggattttttcttgctgatttatttgtagattctggatattagttctttgttggatacatagtttgcaaagattttctcccactctgtgggttgtctgtttactctgctgtttttattttgctgtgcaaaagctctttagtttaattaagtcctatctatttatctttgtttttgttgcattcccttttggattctttgtcatgaactctttgccgaagccaatgcctagaagattgtcttctttccatctagctattttaggctaagagaaaaatgaaagactaattacaaaaaccgtggagtttaatttctgttgtgcaaaagaagcagtagacgcttaatataaatgaattcaaactagaagccactaagacatgtacttccttccttcagttaaatatatcttctagaatttttatggctttaggtcttagatttaagtccttgatccatcttgaatagatttttgtgtaaggtgagagatgaggatctactttcattcttctacatgtggcttaccaattattccagcaccatttgttgaatagggtgacctttcttcactttgtttttgtttgctttctcgaagatcagttggctgtaagtatttggctttatttctgggttctctattctgttccattgctctatatgcctgtttttacactaataccatgctgttttggtgactgtggccttgtagtatagtttgaagttgggtaacgtgatgcctccagatttgttctttttgcttagtcttgctttggctatgcgggctcttttttggttccatatgaattttaggattgttttttctagttctgtgaagaatgatggcggtattttgatgggaattgcattgaatttgtagactgcttttgacagtatggtcattttcacaatattgactctacccatccatgagcacaggatatgtttccatttgtgtgtgtcatctatgatttctttcagcagtgttttatagttttccttgcagaggtctttaacctccttgattaggtatattcctaagtattttatttttttgcagctattgtgaaagtggttgagttcttgattttattctcagcttggtcgctgttggtgtatagcagtgctacttatttgtgtacattgattttgtatcctgagactttactgaattcatttattagatctaggagctttttggatagtcttcagggttttctaggtataggatcatatcgttggcaaacagcaacagtttggcttcctctttaccaatttggatgccctttctttctttctcttgtctgactgctctggctagaccttttagtacaatgttgaatagcagtggtgaaagtgagcacccttgtcttgttccagttctcagggggaatgctttcaacttttccttgttcagtataatgttggctgtgggtttgtctcctcagttactttgcctaaaatgtctgaatggttaaatataatttttttaatttaaaaatgatcatgttggagagaaaaccacattaaagataacatatgctacaatatcatagaaaagcataagaaactcttagaatatgacattgccgtcattgttgaacagaatttctctcattttggatcagaggcctgcaaaagagaactgaaaaaatggaaactggcttctttagagatgggaaatatgatctcattgctattatggattagggagaggttctcaaactttagccgcaaaagaatcatctggaaggcttgttaaaacaggttgctgggcctcacctccagagttttttattcaagaggtggaagagggcctgaacccttgcatttctaacaatttcccaggtgatgccactgctgctggtccagcaaccacaccttgagaaccaccgtattcatgtatatactcaaggtaccttgatgatttttttttttttttttgagacaagagtctcactctgtcatccaggctggagtgcagtggcacatctcggctcactgcaacctctgcctcctgggttcaagcaattctcatgcctcagcctcccaagtagctggtattacaggcatgcatcaccatgcctaggtgatttttgtatttttagtagagacggggtttcaccatgttggccaggctgggtttgaactcctggcctcaagtgatccatccatcccggcctcccaaagtgctggaattataggcgtgagccaccaagcccagctgatgattggtttttaaagtcaagaatctgaaagcaattttatctccagccaatttaatgtaacagctctcaaactgaagctatcctatgatgttacaatttagagaatgctgtaatatgtaatataaggataatctgattttcaaaaagttagcctccttacttaggagtgacaataggaatagagcttagatatttcccagtcctgtcagaggtgtccttgcagggagtctggctcttttctccctttccctggccttcattgatctgtccaattttccctggcagagctctctttacgagaaaaggaagatcctggctggtcagcatgaggatgcccgggagctgaaggagaacctggatcgcagggagcgagtagtgctgggcatcttggccaattacctttcagaggagcagctccaggactaccagcacttcgtgaaaatgaagtccacgctcctcattgagcaacggaagctggatgacaagatcaagctgggccaggagcaggtcaagtgtctgctggagagcctgccctcagatttcattcccaaggctggggccctggctctgcccccaaacctcacgagtgagcccattcctgctgggggctgtactttcagtggtattttcccaacattaacctctccactttaacctcttctaaaatacccaaccaaaagatcactgtttctctcaacactatttaatctgaaaaatgtttcagtacaaaccactgtttgaactatctgggttattggtgtttgttcctgatgaaaggaaaaaaattctctccaggaggaagcctttttccttcttgcccttcctgattgatcttctgagagctcgaatgctgctggacacgtacccctttctattattactttgtagtagaaagaaagttaatgaaactgagaactgattggagggtgtttgatcatttagtttttaacaggctgaggcaacatggatcagtgtgtgtccccctcaggaatgtatccacagtggccttccttgctggtgggcagtgtatcctgatggcagggtacaagtaccattaatgaagggtctgcaacataaagccttaaaaagacacacactaagaaaactgtaaaaccttgaacattgttatttatattttttaaaatggaaaagatcactatgtttgttgtgctaaccacttatttgattctgttttgtggtggacatagatgattacgtttgagctttgtattttgtgaaaaccttaatgaaatgaattccaaagatagtcacgttgagcgtgaagactttttttcttacattcctgtcttatttttaccaacacgagcaggcattctgcgcttccactggactgagtatgggggagtcctgctcccctcctgtctcacaccttccccaggaggaaggcctcatgcactgcggttattgcatcatttcctagtgcttcatgtcattatcactggtggggaaacaaagctaaattttattaacaaagacaactctcagacctatataataggaggaggacgtccagaatccaacaaaattcaaacggagcccatgctgttctcctgaacaagatttgggctaaatacggcctgtttattgaggctgttttaatgatgctttaaaaaaaaaaaatgttttctaaaatgtcaaacctgttgaccacactttgattaaaaactgcctccttaacctctgaagactgattttgctttatcatgtttcaataataacatttcagaggttactctgtagccccagttgtaagcttataaaaacaaactggaaggctgaggaggttatgggctggcagccaggctatgtttacagctgctggagatggcagtagccttatactttgagcaggtagtacatcccaggctgtgctagaggtagatttgttttttcacgtttgatctgtggctggtggccacctttgttgatttgggcttacgagtttcatagtagccagtcttagaaaattgggggagtaaaattttgaagtaaaaaaaaaaaaaaaatgacaagggaaccaaatgctccttctccccttagtacattttcattacttaatgaagttttatctcctatgtaagaatatcaaaattgtagtttgggtctccagtagagatgtcttttgattaacttataaacaactggccacccagaagtttcctttgcatagtcaaccaaagctatggctttgttctttggagcttatatactgcatgactccattgatacaaataagacagcaccttggtttcccagggatgttttcattcagaggtcctgtctcccaggaaagcagtagaaccagtgacagcattcaacagccacactgcatggtcatcagtcttaggccaacatgggagcctgaaattaactccatcagtaactacctgtgtgtcttgctgatactgaatgagccctcacaagccaagccaggtggaagacagccagcaaacgtctacagttattcttagtgaaattcctcagaggaatccagggggctcccagttcccaacactcttcgagatgaccatttttcgggatttgactggggaacattttacatattcagtctttctcaaaaatttttatttattttcttgagaaagggtcttactatgttgcccaggctggagtgcagagtggtgcgataacagctcattgcagtctgaacctctgaggctcaagccatcctcccatctcagcctcccaagtagctgggaccacaggtgtgcaccactatgcttggctaattttttgattttttatagagacgggggtctcgctatgttgcccaggctggtttcaaactcctgggctcaagggatccttccgctttggtcccagaagtgctgggattacaggcatgagccacttcacccagccacttttctaatttatagacataaaagtaattgactcccacagcacagtaacaggcaatgctgcttggcatgccacaaacatctgaaagcttgtgacactcctaggattgtgtccattctttcattatgtggaaactttgttctgttatgtgaaatgggtaaggcaccaagtgagactttgaaatctaatttttaggtggatgtgatatttattgtaataggacttgacctctgtactttaaagaaatcactaaccaaattttcaaagtttccttttaaatgcgtttagctagaaatctatgtatttatccctttcctattttgcattcttctcccactatttttaaaaactcatttacagtagaaaccattcttctttctcccaacagtatcctttgccaagaccatgagaacagtaaggagcatgttgttggtcagggtttcagaatacgcgtgatgtcactgagaatgtttgctcacagtcaataattgtctttgtggatgtgataattttggagatacacttctggtcagaactcaggtgagataatcttgcaatactccaaatgcagatactccagccacccgcaaggttccaggaaaggacaatgtcctgcgagaaaatcaggaggcctccacttcctgggccacttgagaagttcctgggcatgtcactacatgttggttgactcagccatttctcatgctgttttgtttcttgcggtggccacttaaccccaaagaatgaagggaggatccacagtgaaagtgcctgagtttctctatgagaccagatgctgtcgaaaccaaacatcttttcctttgctctatgggaacattttagggtttgttttgcacagctggtttccagactagaagattaacaagtttgggtccacccctaagaatcagtggctgtcttttaaggtgaggagtgtgggcttaactgaggtcctttgagggagctataaaggagaaacaacctgggacatcccagttttcctattcctccactgttaatatctcatctaaaataattcatgagtttaaatggtaaatatatgctttaagctctacctttaaacttgtatgttattcaggcatctcttattaagatactgggtctctggatacccaaggaaatgttggctttttattcttatgtggttccaaatttacttctcttcagtttaattgtccatggtagtgctggcttcattgttaggttggagttattattttccttttagaacaacatgaattttattcaccttactattagaaaaaggaataactacagccagaaataacttcatttcctacaaggtataaaaagtggtcaagtgaatgtgaaggggcttttctacacaggaatatattatcgggaacaaagtatttcctgctgccttaactctttgggatgcataggataaaatgataaagaccattttaatatcagaaagggttgtcttattaatttttaaataaaacttcacatttcttaatggggagctcattcagaaactaaataatggtttctcaaagtgtggtcaggatacgatctgcatcagaatccttggaatgcttgttaaaaataccaattgctatgacaaaaccaagtctgctggaaactgcatttcagcaggtttcccatgttattctgatgtattttaacatttgagagccactaccaatcatctgtacagttcctactgttatgatcacaataagactaacatgaatttaataatctgaataatttttaaaatttaaataaacagaaattgaagttaaatttaaaaataaaaataacctcagaagttgaaagtcctgtcatatttattctattagctatataagtttatactgtctccactacttttatataatccccaaggttgtgatacagattttgttccctgtttactcttttttagatctgttttaaacaagttatgcacttattcagatttaattgcactaattatttttcctcaaaaggaatcagttttatcacacattgccagtaattttaagttctgccctgactgaaattaatcaactggccttttcagtgggaactttactgatttagtgggaatcagattcctgttgcttcatcacaaatgttatcctacatatgagttagaacctctccttggtgtggatttgacaatttagctaatgaaacaagactgtgttcattttctttgagaaatgaaagcagctgtcacccaattttgaaactctaaaatcaaaattaggcaagaagaaagttgtgaatgaaaaaactggctcattgattcctacttcattctataaattattctctaggtggaaaggcagctgtatttcttgcttaaacactggtattgctattgctttacagtaggttgaacaggggaaatatttatataaagagttattaaattctgataaacgagtgactataggacataaggaaattctctctggtaccctagagctaaggaagagtactcaaggaaagacaaactgggaaagagtcccaagcctgaggttcagacctccttggagaactgaactcgacccacatagcagggaagttagctggtttgcccaggctggaactggtctgcagtccctgagcgcataggaagcaaccctccagagtgcaggctgggtcagtccaccagcaaccaacagcctggctgtgcacagagtgggggcctgcagcaggcgtggctgcccagtgggaaccctccaggtcacaggtgatcctcacaggatcttcagagagtgaggagccagtgttggcagaaggccttccgggcactgatgcagcaggaatctttcagggctcaagtttgtaatccacaggcccaggagaaggttatggccagaatgaggcttcaaggtcccaaggcaccaccaattgtaggcagtggttggaagagaactccatcagatgtcctcacacccataccactgacccataaggcagcagccacaaagggccccaacagcaccccctatggagagagcttaacatcgtgctgactgtaaaagatgcttaaaaggaccctgcccattacacagacacttgattgaagggttattccagagctgagccaataaattgatagccgtcacagacacattgttctacatatataccctggcattatcttctgataccacatgtaattttatagttgctgattctgtaagaaccatttctcagataataaaacagtgcctataaaatggccaacatatctcttgaaggaggtgtcaaaaggaaagcagtttctcatttatgttttctttaaacatgctccatacac

SEQ ID NO: 546 - DNA, 79055 bp, Homo sapiens
  source 1..79055: mol_type = genomic DNA
gacatcttcattatgaggaaatatgttgctgcacagaacaaaataatgtagattataaacacattttaacacattcacatgtatattaagaaagtacattgtcatcaaatgtcttaacttaccttgggtcattttgtgataatcatgccatattgcaaaaaatgtaagctatacaatatagtgagtcaatatgacattttatgtaatgtaataaaactgctactataaaattattgacattcagtaaattttaaaatggttatgtacttaaaactgggtcaatctaccaaaattttgaatcaatatataatttagttaattctgtattctcttaaaaatattggtcatgtcattttaaagagcattattccttctgattactctcatctgtgaaattcataatttcttcttctcaccagttaactatcttccatataaaaattccactgaaattcctttagtgacagccttttctttaatatcagttcattttccctggttcttaagtttccatttcttttagcttctgtccctggcacatttggtagaatatatagccaccagaaatacccatctgtgaaaattacctttccaaaatacaccatattcatcaaatattttttcttccaaacatctatcaatctacagaattctacaaaacctttagcattcttaagacattacttcatgttgcaaattgatcaaaactccattttatgtattccaggatttctcataaataattttctcaaaattactaaatactcttttttgtataattcaaaacttagtttttattgtatggtcaccccttggtataaacagggagttggttccaggattacccccatataatcaaattctcacatactcaagtcctgcctgttggccctgtggcgctcacttatacaaaacatcgccctctgtatactcaggtttcacatttctccaaatactgggttttttatctgcatttgattggaaaaaaaaccacacataagtgaatctgcacagttcaaacccatgttattcaagggtcaactgcactttgaattttttgaaaatatatataaccactaactttctcacttacttgcacttttttgcatttacagcacaaatgttaacattatttaattttatgtagcctctcctttcatatacaaacaacccagtactcatctttcatattatcgttcagattgtcacctacctatggactgtgaaataactgtgttaaatgatgaaaatatactactaatccctgagtattcaatttcatgttctgtttccaaaattgtaagtcaagttctgccagtacattcccttccttaaatatggcaagagttttgggcacgggactcctaggaaatattatctatgaaatctctctaatcacttatatcattttgctttaattactagagaatagagcattaaataaatcttgctatttttcttctctgtcataaatttctaccaactacattttggctaaatctagaaagttaactgtaacctgcctaaaggagcccacacacctgcttaagtcacaaagcatctaaacttctgtgtacagaaaaaacagaatgatcagtcttgacaactcatagcagagagttaattaggtaataagttcagttctgctctatcacagaacatgaacgctggggctgccttacaaaccaggaaactagagcccaggcacggtgaatggtacaactgtggtcacaaaattaagttacaggtagggccaaaattagaatccagagatctagtcagctggcctttctactataccacacagatgtaagaccaagtttgttgtttacaaacaataaggaaaataaacattttgcctattccttcagagtactgctcttagctcttaactacttgtctatcagcctaagcttttatcttagactctctcctgaggctttccacatgttgtcacattggcacatatgtgctttgaaacgttttcaaacacttaacactgctgtcatgtggcacttcactggttttccttttatttttgcacctattggtcttttttctgggtgaattggtttgaattttttatttagttggttttacaagcaaaccccaaatatgttgtttacttatgctgagcccttaaattgtgttaaactttgagatagcattttatttcactctgcctctggcctttccatattcatagaactacttccaattgagcactccaggtttttgatgtgtgtcccaatatctcagtgttcttacttagaaaaaccctcagcgccatgtcagtgcaatcctggtccttgtctaactgaaaagcaaggtgaaaaattacctcttcctgattgtttataatggataccaggtgaaaactcatttttgcaccatatccagaaccatttctctaatttatgcctgaaccaaatgagctggctgatttgaaaccacaaagaagtcagtttataagatgtatctctctctttctcagttattttgggaatggaaatttcgttaagaagtttagtgtgacagagtcaaagaaaattacccatttttgatgtatttacattacatagcctatatttccatatgtaaaatgtataccgcagtttgtaagtaatagtttgtgtgtttgaggatcactggatagtcacaatgcaatgttgtcattcatcagtcctctcatgtagtatatatgcacacttgatctacatgaatatttttcaagtcaaaatttatctattctggttcccatataattagaggggaaatttgtgtattcaatttagctcccttttctgtgtataaccctgaatgctagtgctatgttttctttgattttataggaacacgtatcaaatacccagtaacttaagttatactctctaacaatctgtggcatagtaaatgctggtaatggggtattaaactataaatatgtttcagagatccttaaagaacaaaatatttcagcaaaacatcagcttccgttggttattataacagatgttcccttgtgtccttgtgctgggtctggttgcatcctcagatgggaagttacatcaaagtgtgagccattacagcccaaggaatagtttctaatggtttcgctgtcatataagtgctccagggcatatccagttaatgtgtaagcatgcttgtcaaaatactgccggtgagagccaaagcagtttggagagacagtagggtggtctcctgctgtctgatgaggagatatatccgaatgcagatagtctttagctaggatcaaactggattttgaaatgcgatccgaattgggactacttatccgagatagtgcggtgggactgttgtcatagtcattttcatgggggctcaacatttttccctctctctgctggatatggtcacatggtgaagtgttggcaagagcagagccatggcagacttcacctgttggtgggggctgttggtagtttgcaaaacacagggagtgttttttcccagccccattaatggaagccagttggtctgagggggctttccttagctgtaatctgttctcttcttctttaatcatttgctgagtggctcttataagagtttcaattttgctgggttcatgtgggctactttgatactgctcagtacgatatcggtcacctgattcactggccgacccagggtctggagaactgaccacactatcttcatcccaatgacctcgccctaaaaattagaaaaagtcaaaagtaagtgatctcagaattcaccctcaaaataagtatatttcctttacctattaaaataaactttatatctttcatttttaatatatgcaccaatatttgaaacaggctcacatgatgtgagcacatgagtgacacatgacactctatgtgtcaactctctgtactggattcatataaaatcagtgaattttaaatgcagaccaagtttataacaagtttcttagaagataaaccttgttcattgtgaatgacaattagcaaaatggtaaagtgtgtttatacttctccatggatatatgttattagacctgtctgactggaaataagagaaggatgcatagaatttggtttatgttattctgtagagcagtgccatgttaaattgatgcttgaaaaatgtttttgattggatttgagggaaatgatgatacaggctgaactattctctcacttccaaataaataacctaaaatgttagtattgctaaatatatcttaagtagagttaaaataaagctctaatatatcttaagtacggttacaataaagctctaatgttcatttttagagtatttgaaggttaaaaatatacatctattcacatagatatatatgtaagcatggatggatataactgaagattatagatatagatacaatcttgtccaaataaaaacataaatattatcaaatttaggggtaaacatctcagctttacaggtaatcatatagtaactcagttaccttagattgtttttgaagtaaggtaaagaataaggccgggcatggtggctcacacctgtaatcccagcactttgggaggcccaggtggatggattacctgaggtcaggagttcagtaccagcctggccaacattgtgaagccccgtctctactaaaaaatacaaaaattagctgggcgtggtggcaggcccctataatcccagttacttgggaggctgagacaggagaattgcttgaacccgggaggcagaggttgcagtgagccgagatcgcgccattgcactccagcctaggcgacaagagcgaaactctgtctcaaaaaaaatttttttagacaatatttataattttaataacaacctgtttggagccaaggaaagagataaaatatggaggagtagtgcatccaaagtatattccataaatcaaattattctcaaaacagtctgaagtcaatataaaaagagagaagagaaacaagtaggaatatatgaaagctgtaaactgcttaatgcagcagagaaagcctggatcacactattcgttgctttccttttatcttttcttcttgttttatttctaatattttcttccagatcctgtaggttaagccaggattttcacttaactctattctttggcaagtgattgccctttgctctgggtttccattaccagtctaccaaactagagatactcaaagtaaaatcagaaaaatagaaagcaagaatagaaacagattaaaattactcagcttctgagtggtatctgacaggaaggtttattaatggaaacaatattgtctagcacatgtctcattctaaagacaagagtagtagtattggggccttcagatcaatcctaatgtcactgacttttaatgaaatagggaggattccaaagaccggtctggacccaagcttgggatggacggaatgagctctccttaaccagtttactttgaaatgaacaaagggaagcattagcaacaatcaaagctttagctatggtgtccatttcgacgtgtttataaagccatgtaattatcccaaggtgaaaatcccagtgcattctacatattgcttcatccttcactcacggggtcatcattgtgggttgtcataatgatgggggaaaggggaagttactggcatttaatgcccagaaaggttaaacatttgagatatgtgtgactgtccataaaacaaagactggccctctccaacatatcaatagtgccctcattgagaaacactgctatgaccaaatgagcctaccgactattcaagtccacatttgaagcacgaaaatacaaaagaaaataatgtatgaggaatgtaaatgcgtacacactacaaattcaatagacatattcaataataaactatgtaatttctatactttctgatgtttaatataggaatcatttttattcacttgtcaaaactaaatgtatttagcaaatacaagcaaaattaataactgagtgaactttgtttttaatcccattggttctgatttgtaaatcaaagaagataactatttggtcattcactctagtgtcacaatgtgatgaacctgcccagggcctaatgcttggagttcgggaaccctttcacctgctcttaccatggatcctgtggactgaagcgatgtgaggcatgctgttttcataggcttctctgctttctggggaggcctttgtcaggggcaaggctgcgcgagagccccaccagggctccctcccggcctgcggcgttcccaggaagtacctgcctgcctcacatcggcctccttcacaggcctgggtatggaaatgcctctcttccaccagcctcgagtggtcaagcgcaaagccatagcagagagagctgcggtccgaaaactgtctgtaggcgcacgatgcgtcgtgctgggagccaggcctatcggcggggtccagaagctgcggagaggccgtgtcggtcaagggacttccgccccactggctgtcatgatcagattccgatctttctgtgtgaaatcccgaatactgaaaccgagtaggggagaaaagtccatttcaaaaatcaatcgatcagtaagagaaaacaaacaaacaaaaaacagcctttatttactctacaagcacccttaaggtctcattgtcctgaggtcgtcaaaataaccgttgctttggcatcatggctgtgcacacctaacttggaattacttaattcattatgatgcttccaaagaaaatccttttggttgatgaaagcaggagataaagataataatggcaaccatcgactgaagtactaggcactgaatgaagtgcctcatatgaactatccacttagctcctgcagtaaacccttaatggcgctattagtatccccagtttagggatagagaagctaacgctcagagagagaaagtgatttgcccaaagccacagtgttagcaggtgacacaaccaagattcagacccaggttcttcgtctaccctaacagtattgccaaagagagattccaagtaagttccatattttatttctatttgctttccacgtattttttggttttgacagggtctggccctgtcccccaggctggagtgcagtggcgtgatcatggctcactgcagcctccacctcctgggctcaagcaatcctcccatctcagcctcctgagtaggtgagatcacaggtgtgcaacaatacacagctaatttttaaattctttggtagagacagggtcttactttgttgtccaagctggtcttgaactctggagttcaagcaattctcccgcctcagcctttcaaagtgctgagattacaggtatgagccacaacacctagcctacattttttcttaattaaaacaaacaaaaacctaaggtttaaggctccaatctcctgaaacttaatcttcattaagttaactctgttaactctctgagggccatgctggatagatggcagaatagttaataaacgcttacctaattcaactgcaatgtaactcttaagaagtcttatcctatataagagttgggcctcttcactaggatgtgcctcttgtttagaagataaaacttgaaatatgcatagggtcaccagaaaataacaagccacaggcattgctgtgccttgttggaattaaatggcttatctactcccagactatttggtcagattttgaaagagaacataaaatgcttgatagatctccctaggaagtgtgctcagtttgaaggccctcacaagccactaaaatcagtaatataacaataatttttaccagtttttggttgcctaatgccaaacaattctaggtattgtaaagagattacctactatgataatgatgggtgccatttattgagagcttactatgtgtctggcaatattccatatacattccatatacattttgtcatttaatcattccatatacattttgtcgtttaatcctcacaaccacctgaacataatatagctccatttaatacaggaagaaaggacattactacaagttttaataagatgacacagccacctcacagtctatctggtctcaaagcctgcacttgaaaccatgattttacatttcagataaaacagtgctaacgaaaaaaggagagaaaaaaagatccaatattagggagatttgcagtgaaggggcaggaactgtttcacagtcccaggaaccaaaatacaagtccattttagacttttatttcttaccccagaataaacaggggtgggcacatgtggtgttgtggagggaagaagaaaaattcctaggctccactgctgttcccttgtcgcccatgatgagaacttcataggacaaaacaaactttcccctcaccactaggcccaccctgtgggagtaagaatcctgggtcttcccatttcagtaaaaagaggcaactcagctgagggctgttggggacagagagatgaactacacaggttcctctggggaacctccaaagtatgccaatatagcatgctcagaacagagtcctgtgcaaattccaggtcaaaatttttcctttgccatttctaattattactttaattattttccacctacacatatggactatcagcatattccatcaagaaaaaaaattagaaaatccaccttatctccctgcagggttgtagaataggagacatcaaggcatcctggggctcggtacctacatcatgccttccgcatgccatcatcctcttcttccagtgaacccagactctcttttcacaagatatcgccttcactttcaccaaagcagggctggcgcttcctcaccttactgagtggggatccaagtgctatacatgtgttccttgagagtaccatccatgtgcttgcctcagagaaactcagaccatcagtgttattccaagctaggagttgcccagattctgcttgtttttataaaagtataaaccaggtctatttctgaggtactccagtcaagacttttgagccctgttaagagggggaaaagctttccctgagtgtgtatgggaaagtgctattggcgcaacagagaagaacattctgtccttcaatcacaatgaaaattcaacaagagacaacctgggcatacaggaggtatacatttcaagagcacccaaagaagaatttgaaggataagcctcttgtcaataggcaggaaactacaagaataccaagcgcattgccctgagatattcaagcaggcagaagttgggtggttcagttagtccaagacctcacactgcttaggagatacagaggaaaagcctcacagtaaacctttgttttcaagacctataaatttgcaccagtgggcaccatcaaaactctgagccacgttcatccctttaaaatgaactgcacttgatgtaaactctgttgaggacactacagccgcattacttgatccaaaatatttcaggtattcattaaatatttgaggaaagagagaaggcagaaagagaggaaggcagccagccaatatatgtagtgtgtgcggtgcaatgaatgaatgctgcataaaaatgcagtagtgggttagattagactttatctaacttgtctttcagctctaatactctgtataatataataactatttggtatcctttttagttttgaaatgtttgattcctgtgcctgtccctacatctcagttattggaagaaaataattattgagaacaataatccaagtctacaaatttttattgtcataactataaaaagaaagttattgtgtaaattataattttactataaggccaattttccctccaagtatcccgttatgacacaatttcattaggaattacatgctgccttttggtcaatgaattattatattctagaggcttctgagtttgaaggataatggcaaccactgtaatctggatctgtccacatattctgcccttaagacctataaggtcattaagaagcacaaattaagtcacacatgacccatactatcagcattacttggaggcggaaaatgtgacaaacttcaaatatgctcaactgatttttgacaattcagtgaaggaaacataaacttctcaacaaatggtgctagagtaattggacactcataggcaaaaaatcaaataaatctcaacctgagtgtcacagcttatataaaaaaaactcaaaaggttcacagacttaaatgcaaaacctaagattataaagcttttagaaaataacatagaagaaaatcttcaagatctaggactaggtaaggagtttttagacttgacaacaaaaacacaatccataaaagaaaaaaaaagataaattgaactagatcaaaattaaaaacttttgctccaaaaaagaccccgtgaagaggatgaaaagacaagctacaggaagggataaagcatttacaaattacatatccaacaaaagactagcctctagaatatatacagaactcccaaaaatcaacaacaagaacaacaaaaaagggtgaaagatatgaagtggcacttcactgggcaggatatacagatggcaaataatcatatgaaaagatgttcaacatcattagtgactaggaagatgcaaattaaaaccacaatgaaatatcacgatacacctatcaggctggctaaaataaaaaataatgacaacaccaattgctggcaaagatgtaggaaaactggatcactcatacaatgctgatgggaatataaaatggtgtacctagtctagaaaacagtttggcagcttcttaaaaactaaatgtgcaattactatatgtaatcctggaaatttatcccagaggaataaaaactatattcatataaaacttgcacacaaatatttatagcagctacctccctccacttccaagtcctctttaattgtttcctttctttttcaatgtggaaaaatacaagtaacataaaatttactattatccagttttaagtatacagttcagtggcattaagtacattcatggtgccatgcaaccatcactaccattcatttccagaactcttcattttacaaaactgaactctgtacccattaaacaataactccccattccgtcttcccttcagttccttaacaaccaccattctaatttctgtctctattactttgactattttaggtacctcacataagtaaattcatagagtatttgtctcttcgtgactggtttgtttcacttagcattatgttctgaagtttcttccatgtttaaacagatgtcaaaatttccatcctttttaaaactggagagtattctattgtatataccatgatttgtttatccattcacccattgatgacacttgggttgcttctaccttttgactatgaagctacgatgaacatgggtgtacaaatatgtctttgagactctgtttttaatcctttagggtatattaccagaaatgggattgctgcatcatatgataattctattttgaattctttgaggacctgccgtgctgtttttcatagaagctgcaccattttacattcccattaatagtacaacgggttcaaatgtatctacatcctcaccaacacttgttattgtgtgtgtgtgtgtgtgtgtgtgtgtatgtgtagtagtagtagtagtagccatcctaatgggtgtgagaggtgtctcattgcagttttgatttgcatttctctaatgattagtgatgttgagcatccttccgcaggcatatttgtcatttgtaaatctttggagaaatgtctattcaagtcctttgcccatttttgaattgagttgcttttgttgttattgagttgctatagctttatttttaataaccaaaaactggaaacaactcagatttccttcaaaagatgaatggttaaacaaaatatattcataccaggcaatattactcaacaataaaaaagaatgaaccattgatacatgcaccaatgtggatgaatctccagtgaattatgctgagtgaaaaaagtcaatccaaaaggctatatgattccatttctacaacattcttgtaatgacaaaattacagatatgaagaacaaattagtgcttgctagggttaatgacaaaagcaggagtaggagagaagtagatgtcataaaaaggcaacatgagagatccttgtggtagtgaaattgttctatatgatgatagtaataatgcaatatcctggttgtgacattgtactacagctctgcaagatgttaccactggggaaaccagataatgagtaaatgggcactttctgtgatacctacattttaacttagaagtatatcaaatttacaatttgactaaaaacagaaaaatagacaaatcaagaaaacacattaaatatagcataatgcattcagtaagtattaaataatatgacagcattgagtcaaacatatcaaccccatccataaatgtgaattggcttaaatcaccaattttagaaaagaattttctgataatttatagagcaaactcaattctatactgatcatgtgacatgcctaaaacacagtttcaaaaggctaaaaataaagggaaaggcaaacataaacaaggcaaatgtagacaataagaaaccaagagtttggattataaaaccaagcaaagtagaactcaggctttaaaaaaagcattaaataaaacaaaacaaaagacattttatgttgctaaaagccagaattcacaaagaagatagaaatgttatgaatatttatgcaccaaataacattgcaatgccatctacatgaagcaaaaactataggagatacaaaggagatatagaaacatcctgacaaataaaagactaacataccactcttagtaacagagtaaagtaaattttaaaataataaagactacagaagacttaaaaaaaaagaaaaccaatcagttaaattgtatggctatatatcacttcacatactgataataaagaagaaagcttcttgatgtagatgcccaatcatcaaaatcaagcaaatattaggtcacaaagaaaacctcagtaaatttcatggagtagaaatataaacaacaccctctgatcacaatgcataaaaatggaaattaaaaacacaatttaaaaaaatgcttcaacctgaaaaaaaaacttttaaataatccttggggaaaataggcaaacacaaattacataaattaaatacagaattctggaggtaaaaactgcatatccagacctatgagatacacagctttgaagagctttacataggaatgatagggacatgtcaaaatgacacaggagccagcttgaaggaattgcctctggccaaatacagaaaaacttaagcaaaagtaaatgacagtaatgaataaattgtaacccactaaataaatccatgggtccaaactggcaaacacactagctaataaacggggaaacataaaggaatcttccttacagtagagtgccaactgatgaatatggagggagtagttgagttagaaaatatacattttgcaatcacctcaataaagatttatttgggcacagatgatcatggatgataaatctcggggaaaaactgttgagaaataggctatttttatggtcttaaagggtttccccacagattgctttttaattagaaggaaaaaaaaacagttatacagtaaagaaaccaaatgacactttcaccaggtgatcaaaattaatatcaccacccaactcagaacagatggacatcatgtgcctctggatgtgacagacactccgaagacacaacctcactaatgaagtattccagtggatagtggataatgtataaccagaatctaaccatgaagaataagcacacaaactcaaactgaagaacattctgtaaaataactgggctgtgttcttcaaaaatgccaataatatgaaagaaaaggccaggctaaagaactattcagattaaaggagatgaaagaggcatgaaaattaaatgcaatatagactcttggactaagtcttgtactagagagaaaataacaaatgctattagggatgttactggagaaatcttacatcttacacctgtaagattagataaaaagcatcttatgaatgttaaatattctgatattgataattgtgctgtggttatataagagaatattcttgtccttaggaaatacacatcgatgtattaaggtttaggtagaggcatgacatatgtaacctactctaaaatggttcaaaaaaaataaataataatgagggcagagggaagggaaagagaaaaaaaatgataaagcaaatgtggcaaatgctaagcactggtgaacctagtgtacaattatactattcttgcaacttttcttaaagtatgtaatcattttaaaataaatatttgaacatcagaaaaatcccatatagtaaacttatgtcttatttttatagaatcatttcagacaaagcccttttttaaacaacatttttctgaagaaatggaaacttgttttaataaagctataatttaatcgtttaaatctttgtttttatttctgactgttaatattttgcatatgaaaatataaagttatcaactagcaatttcagtacaaacaaatcttggattcagacatgggcgtatcctcatctactgccatttcatatgacttgtgcaaaggatcacttttcttgggccttggttttcccatttgtagaataggaacagactaccttataggattgcagtaagaatcaaataaataatatgtataacagcactaaaaaatacaaatggtacagatatgtatgtgtcatgtaaaggtccttgattaatcactttcacttaggtaaacagaaatggttaccatcttgtaaaaattattttctgctgtagactatattgtctagaaaaaccttgttttcagtaccatcttataggcaggaaaagataagatatatatgttaaaggattaaaaaaaatcaatattcccaactgcagaaagaaatcaggccactagccagtcatctaaatagtagggccttttcttccaaatactccagttttcaaagctggaaggtagtttggtaccaacagtttttatcatttacactttgattaagagcctacagatgtgttttaagagtggcgaggagggagaatcatggtcaattaggtttcaggcaagcctgtggatggttctcctagcctttcttggtattgacattattttcttttcttttctcttttttttttttttttttttttttttttgagacggagtctcgccctgtcgcccaggctggagtgcagtggcacgatctcggctcacggcaagctccgcctcccgggttcacgccattctcctgcctcagcctcgcgagtagctgggactacaggcgcccgccaccacgcctggctaattttttgtatttttagtagagacggggtttcccgtgttagccaggatggtctcgatctcctgacctcgtgatccacccgcctcggcctcccaaagtgctgggattacaggcgtgagccaccgcgcccggccggtattgactgttttcaagtaaaacagtcatgctttatgagctagagagtatttgctcttcttcctttgaaaagataacaatgttttctcttatacttaaagctgagaaactgagttattcctttattttcattagattataccaatcaattaagaaagttcagtaaaaatctagctttaattttcctgaaacctcttcttagaaaattttttgtcattctgaatactgtgcaccttaatttacctcaatttcatatttaagttttagttttcaaaacaagcattcattttgcaaattaaaatatgagtcagatgatggatgcccttgttctcatgaaacacgcaaccaaatgccagccaccaaaggtgggctgaggctggcaagcaaaaagctcagatgactgccaaaactggatttcagatgacatccacagtcccccagctctcccctggaattcagcttataacagaatcattccttctagaacagactgataattcatcaggttaaaggcctgagccatcctttggggcttaatatgcacccaatgggatctatttacaaaaattcattctaacattcattctaatatttattaagtgcctgctttgcaaggcggcatgccaggtgataggagaaatacagccccaccttcaaggtgttcacattaagagggatataaataatgcacagaatataactttaatacactttagaaaaggcaaagacctgaatagagggaaaaacaaaataggagttcaaagaaggaaaacattactgtttcccttagtaaataagttatttaggaaaaaggaaaagaactgtgatgtattaagaagcaacttactatatgatttgcttatgctaactaatacccattacaacaatagttaccattattaaacacttgctatgcattcgtcactatgcagattccgtacacactgttttattaaatgctaacaacatcttaaaagtattattaatccctttacagacataacaaataaggttcaaaaaatgtttttgcccaaagttgcatgattatgaagtttaagaggggacatgtaattccagaactcttactcttttcactgtcccatacttcaatatactatacttagataagaaagacaacagtgtcctaccccctatgcagtaatagatttcaagtccccaagaatctttttacaaaggggactttctccagcctctacaccccgtaaaccacctccacacacccttaggtatgtcctctaatcactcaaacagtctcataccacaagtacacccatagatattcttcttttgattacggtcgttaagattcattcctgcttcaacagcatgttccagacaggtgctctgcattcatctggatgtggcagcaaccacccagcccaggaaaaatgccagatgttccaacaatagatgttatagttatctatttttattctggcagctcattgaggtttttatcatttatagctgtaaaatatataaagagaccctcttctggtaaagtcctgtttttcatgaaaaactttcactctatcaggcatgagcagctttcctcttgatttgtgtctgaaccatgagaaaagaaaaatcacagatgcagactgcattgtactaagaacatatgcatgcttttaaatcacttttatctttttttttttactaatgtaaccctgaaacataaaatatgttcttttttttcattcactgttatgggaagaacagatggtgaaagggttagattaaagtaatacagcatgtccattaaaataacccccacttctcgggatgcttccctcaaacaggagtactgtttactataaagaatggctttggcttacacacattggaaattgccaggagttttctcaaggataaacacaggagtaagagaaaaactaatgtcagaatcaaatgtatttttaaatgacaataatgcaacttattttgctaatctgagaggctgatggaaactatgtgcctgtgataacgtagctgaacagcagtcaaataataaagttcatttctaacttgaaaaattttagtacctagaaaatacaactaaataaagctgcaaagagaatatcaagtagaaattattttctacattcctgcactcctacaaataatagaaatttttgctgccatttcatttctaatttatcttattaataaacagcaaaaataaatctatataatacatattaataaaaactaagtataatatgatttctagacaagtctcacaaatttttagcattggaaaagaaccctcctgagatatgtttatgaaatttaattcaattacatacagttcctaaagaattaagctttaaaaaaaacttcaagaaaagttggagaatatattctaaaagaaaaattacatcaaccttgagtcacattccagagttgaggataattttgctagaggaactgagcagtaaatatactcatttatactataaataattagatggtaaatactgaatcaaaattcagttaataaaagttttaaatattttggccatttcttccttcattttaaagaataatacaaattatcagcttcccaaaaccaattttaaagtatttattcacaagatttccccccattattttataatttgattcatttatagtttaatctattatttatcctgatttttttaccttttatccatattttagtcatatttagctcaaaaacatattctggcaagaaatcttttatacatgtaaattctctgatatatttcatgaagtagaaacatgggaagttttaaaaatatgcctcaaatgtggtttgaaatgtcacaggccttctcttaatccaccccaccccccaaaaaaagttacaaaaatgttcctgggatttggttcactcatttttctcacagaaaagtaaccacagtccacatctcattagctgtcagggtgatgtgcagctggaagggaatcagcacgcaggacccagggctgggtttccttcagtgtaactctataaggaatctcctataggattccatatggagagagtcgttcccaaaccatgaaatctacaatccatcccttttgtaaatccaaaggtgatgtcttaaagacttgcaagcattttcattgcactgaatattttaatcaggtaacaataaattagaataagtatttaattaagtcctttatgtcatggcatccacggctgtaaatgattcagtatatcccaacttggatagataatgtagaaatagttctagcccactgggtaaaatcctggatttccagaaccagtagcactaattttaatttaaagtagcccatcttccatgatgggcttcaggcatgtgccagaatcactttgatccttttgctgatgctctgactcactctctgatttttcatatgtaagtggcagattaaatgggtttgaattaaatgggtacaggtggtgccacctgctccaaccccttgtggcagctttgtttggtcttctactgctttattctgtgtttggacaaagcatggactgcccaagctgttcttgggagtgtcctagaactaggccagcagattgtcaggcatattaccaaccttgtgcacgctgaaagaggaggtctatcagatttgtaattttgtaaaaagaaattgaagcttaaaggccctccaccaagttgagcaactgtgaatggaaggataagtctaccttttcttcttctaagtcaagtacagtaaaaatgaggaaaactaaaataatataaactatattaaacaatatacatcagaacctttgcctcaagctttactgcagtataattgactactaaattgtatacatttatggtatacagcaccataaatttaatgtacgtatacattgtgcaatgaataccacaaacaagtttgttaacacattcgtcacctcacatcgttaccttttgtgtgcatgtggtgtgaaaacttaagattattcttagcaactttcaagtgtaaaatacaatattattaactatagtcaccatgctctacattagatccccagaacacatccatcttataactggaagtttgtacccttttgatcaacgtctcctcatttcccccaccctccaagccctgacaactatcattctctatgagtttgatttttttagattctacatataagtgaaatcatgcagtattcatctttctttatgtggcctatttcacttagcatgattatccatttttttgcaaatgacagaatttccttcttttgtggctgaataatatttcattgtatatatatactttttaatccatgcatacagtattccatatataagtgaaatcatacagtattcgtctttctctatctggcttatttcacttggcaggttcatttactttgttgcaaatggcagaatttccttcttttgtggctgaataatatttcactgtacatagatacattttttaatccactcattcatcaatgaacatttaggttgtttccatgtcttcattttgaataacactgcaatgaacatgagagtgcagacatctcaacatactgatttttttttccttcaggtatataagaagtgaagttgctgaatcatatcatagttctatttttaattttttgaagaactttcataccattttacataatggctgtaccaatttacattccactaactgcctgggtttcccttttctgcacatctttgtcaacacttacctcttgtctttttaaataatagccattctaacaggtacaaggtgatatctcattgaggctttgatttgcatttctctgatgattagagatgttgagcaccttttcatgtacatgttggccatttgtatgccttcttcaggaaaaggtctagtcaggtcctttgctcatttttaatcaaatatttccttcttcttttctttcttttttctgcttttctcttttgtttattttgctattgagttgtacaagttccttatatgtttgtgatattaactcttcatcagatatatgatttgcaaatattttctctcactccaaaggctgcattttcattatattgtttattttgctatgcagaagctttttagtttgatgtactcccactgatttatttttgcttttgttgtcagtgcttttggtgtcatgtctgaaacatcattatcaagacctatgtcaaggagctttttccctatgtttttttctagaaactatatagtttcaggccttacatttaggtttttaatccattcaagttaatttcattctttgtatgtagatatctggttttcccagcacaatttattgaaaaaactcttttccccattttgcattcttggcatctttgtcaaataatagttgatcatatatatgtgggtttatttctggggtctctattctcttccactggggtatatgtctgttttaaagctggtactgttattgtatggattattatagctttgtataataatattgtttgaagcctggaagtgtgattcattcatctttgttcttctttctcatgaggtgctttggatattcgggatcttttttggtcctatatgaatttgagaattttttttctatttctctcttttcttattcctggtcttagagggaaagttttcagcttttcaccattgagtataatggtagcctgccctatataatctttactatgttgtgttacatttattctatactaatttgttgagagtttttatcatgaaaggatgttgaattttatcaaatgctttttcagcatgtattgagatgatcacatgatttttatccttcattcagttaatgtggtatataacatttattgatttgtggatggaaccaaccttgcatcccagggataaatcccacttgatcatggtgtatgatcctttcaatatgttgttcaattttgtttgctagtaatttgttgagaatttgggtgtctgtgttcaccagggatactgacatgtcattttcttttcttgtggtgtcctttttggcttcagtatcagggtaatgttggccttgtaaaatgagtttggaaatgtttcttcttcaattttttggaagagtttgagaaagattagcattaattatttaagtgtttggtagaattcaccagcgaagtcatctgatattagactttgttttgtttgggagggttttgatgattgatttaatctccttacacattattgatgtgttcagattttctttttttttacatactttaagttttagggtacatgtgcacaacgtgcaggttagttacatatgtatacatgtgccatgttggtgtgctgcacccattaacttgtcatttaacattaggtatgatgtgttcagattttctgtgccttaatgattcagtcttggtagactgtatgttctggaaatttatccagaagagtaagttatccaatttgttagcatataattgttcataggggtctcttataatcattgatatttctgtagtatcagctataatatttcctcttccatttataattttttatttctgtcccctatcatttttttttggttagaaagctaaagatttgtcaattatgttgatcttctcaaaaaaccaactcttacttctgtttatcttttctattgttttccattctctatttcatttactcctgctccaatctttattaattccttccttctgctaaacttcagtctaatttgttctttaccttatagttcctttaggtgtaaagttaagttatatgaaatctttatttttttcttaatgtaagtgtttatacactttcctattaaaactgcttttgctgcaacccagacatttttatatgatgtgttcccattttcattcatctcaagatattttttatttctttttttatttattctctgattcattggttgttcaggagtttgttaatttccatgaaattgcaaatttttcaattttcctcctgttacttactgttagtttcatacaacttttgtcagaaaagatacttgatataagtccaaccttcttgaatttattaagacttgatttgtggactaacaaatgacctatctggaaaatgttccgcatgagcttgagaaaaatgtatgttctgcgtcagaaccttgaccttatggaaaaacaaagcaattccatgcactataatacgccaagagagtttcctaaaaaatctgtgaaagaaggaagaattaaagaaatctatatttctcagctaaagatatccaaattcaacttcattaactctagaagggtcaaatcccaccatatactgccaaatgaggcattgctctctttaaatttactctttagttttaataatattttattctatagattttgttaaaacaaatttccctagatacgttttgatagtagattcagccattctcctcctctcttcttttaagctggggagcggaatcacaaattgcagcatcacttccattaagccagaagcagaggcttcccatttgatttagcacagttgctccacccgctgcctgatttcttttttgacactaactcttccccagatccaaaccacactacactatggaattgtgacatgctgaacataaattatgacatatatccaggaatctgtaaggatgagagacaaagctgcagctgtgctttgatgggtggataggatttgagaagcaagttatcctcaggcagagtaaacagactctagctaaagtggagtgctgacatgggggcaggcttggcaggtggactggagtgggtagagtgaggcaggcaatgggccagactgtcaagattggatgtcatactctaaccaatgaggtggctctgtaggtatttaagcagataaagtaaggcataatgaatatcatatttcaggaatcttatcctggcaggaatgatcagagaccaaaagaacaataaagaggcagatgaagttctctaaatgtgatgtcctcttccagagagcctggaaccagacaaagacagtgaggagggaacaagagtcaagaagcattatgaaggaacatgaccctcacaaggccttttatgtccagaatatcaaaaaccaagccaaacaaacagaaaatagtttaagatactttccctttattgtggagaaaatctatctttcataagcataacactattaaagatgtagaacaaaaaatgtatataaactattagaagaagaataagaatgtaatctagaaagagactagttatcatgagaactgagccctggaactagggctgagcccataaacaaacatgggtaactgagatggaagatagggtcaaatggcatttcctacacagccactcaactgccgatgcaattattttattatcaaaacacacatacaaagtaaataacagctgtcacatattttcattttgtactggagacgacagtgaggacatgaagactagaaagcccagttcaggactggaaaccctggagtatgagacagagagtgctcattcaaagttttactctcaaaagaacccttagattctaccacatctaattcctcctcagcactcaggtgtttgatttttattacacaatgtggcatttgtcagaccatccctaggttgttttgtctctttacagacgttatacatttcttagcagcagtatgttcccctcttcttggggtttttatatctccacagacaattaacaaagtgtccgcacaatttttaaatttatttatttattcattcattccattatcatttagtgagtaaatacatggatgctggggaatggagggggagggaggtggatatgaaaaagacacgtcattactttcaaagagattatagtccaagagaggagatatgacatgtctagaaggcagtagaaggcagattattctaaataggggtccaaaggagaaatataactcagcaatattttatgaaagaggtggcactcaatctggaccttaagcagaattttgaaaaataggggcaatgcatgcagaaataaatgcataagcacaagcgtgggggcagaaaaagacaaggcattcaccgaacagtgagtaggccagtctacctagatcacaaagttcaggtaggggaccaacaagagagaatgcggggaaggttatttagggcccaattataaatgaccttgaggaacagctagggcagtggtgggtctccaagtactaacatgatcagtggtctctgatcatggtctgggagacatggcagactggggaggaaaattttccaaaatagggagaaaattaagatgctgttacaatcatccaggctgagggacctcccaggacacgggcaatgggggaaagaagatcaaatgggtgaaagcacagaaaatcacatcttgggctgggcatggtagcttgcgcctgttatcccagcactttgggaggccgaagcgggtggatcacctgaggtcatgagttcaagaccagcctggctaacatggcgaaacgctgtctctactaaaaatacaaaaattagccagccgtggtggtgggcgcctgtaatcccagatactagggagactgaggcaggagaattgcttgaacccaggaggcagagtttacagtgagccgagacagtgccactgtactcgaggctgggtgacagagcaagactctgtctaagaaagaaagaaagaaagaaaagaaagaaagaaagaaagaaagaaagaaagaaagaaagaaagaaagaaagaaaggaaagaaagaaggaaagaaagaaagaaaagaaagaaagaaagaaagagagagagagagagagaaagaaagaaaaagaaagaaagaaagaaagaaagaaagaaagaaagaaagaaagaaagaaagaaagaaagaaagaaagaaaaaagaaaagaaaaagaaagggagaaagagagaacgaaggaaggaaggacggacggacggaaggaaggaaagtcacagctgggtgttgagagtgatcatgagtctggtccttgaaggggcacccaagctacaccaggagtttattaactgtcatcttgcagcccctctgcaaatcttgtaaacagggataaacccaatcctgctgataactccccttaacatgtgagctctctaagcctaggggctattggttctctcactatctgctcccaactcctgtctccagatcattgctggaagggcaggtcaactcccaacacataccaccaccaccacagataccacactgacaccaccacgttcctttatctcattacatactacatgtgttttaacgatgtttacattttaatcttccccattgaatccataagctctctggggtgaggacggtatcctcaggacttaacacgtctcatcactctcctgcttctttctccatctacccccatcaccttggtgggaatcatccatccattcactcatgcactcactcaatatctgctaaggacctctaggtggccaaggcaatctggttaccacgggcaacatctcctatcctcatgaatcttatctttactgccccaaaatgtcttccttttagcatgtcgttgttggtaggtctaatttcaccttcctcatttatgccactttttctcattttttcttcttattgttcttttcttattcaataattcctgctgccttacttagaaaactaatgcgactaaatctagccatccatttacttaatttttgtgagatttgtcatctttaaattctcactattaggaatgcattctaaatgccatgtatcagtgtgtattatgatgttatgatagtaaacatcaataaaatattatacctaagatacccacttaagtaaacaaacaaaaaggtatacaatcctatgtctgattccatgtacctactttatctaccataaatatctattttatactgttgtgctccaaagcaaggtaaaggccaaataagttctctataatggcttagataaactgcattggaaacaaccacttttgcctatccctactgttagttcccttccacctctttacccttctgcacactgtctcctaaaatgttccctttctctatgctcctttaccatgcatattcactcagcaagattgtgtgtccttcatagcagacttcactataacctatttgaaataaggcactctggttcctcctgagacccaggatagaaaaacaggatagtgacaaatacatttggggttataaggaagttaattaatggagaatagtatgaacagaatgtgatttcataaagcaatcatggagaaaccctgtttgtaaaaagggatggatgggcagaagccaacagtccctggacaccactgtctgccccttgccttagtcatatgccaagagaataaaagggcagaaattgtggccttgaggccctatgaccaacgacatcttataattcctctctaacaggttagctttgcctccccaactagaccctagtcgcttaagaattcacctatattacttcattgcacatcatagtatttaactaaatgcaagagttagtaaaaaccaaactacagaggcctcaccccactgagtaaaatgttttctaaaataataatctgagattcatttatgaaaaccatctaaaaagattataaaggtctactctaataatctcctaaaatttcaacaggagaggaagactaatctcaaatttatccatgaacaggaaatacaaataaacctatctaatataagactttctaggaagataacctaaatttttctggcaaaatgcattaaaaatttttgttgttaatggtcaaggattacacatttgggtgttacatataaaacatgaaatgaaggaatagctataccaatagaagtgctatgtataaagggataactatgcttaagaaattattgacccttctgatatctgtgacttaaaaagtcagtctctcagcatagtagtcactggtatatttttgagaccagagaaaacctttgcaaaggaagagtttctaccttcaccaaaaggaagccagattgctggcaatgaaaattaagagggttctgtgggattatttaaggtaacagatgtggaataaaatctgcaagtgttacagtgtgtctgtagcaagtgattaaatactttcagatttcagaagcatacagtcttctgtaggcactgttactactgaattatatagtgtattggttattactgactagggaaaaggcaagaggagggcaggatgacatgataaaacaggatggcacgcactttctgtaataaatgtaactacaaacatgccagtgagaagtttaaaaggaaactctggaatgaggaggcaatttattcatgattgacatgacgaaaccatggcaagataacatccaacttgtgttaatgtagctataactagttttattaaaatagaaaatattgcagcaatttctagcagataaagtctttgaaataaattctataaactcaggttttctaattcagcagaactatgaaaaatacattgctattttcataagcataacaaatgtcataataataaaatacaactgtcataatggtaagattgccaccatacagcagcacagtagctatgggcagaatctttggaaattaactgtaatatttcttacaatttttccaaaaccattcaaaacaattttattttgacctctcctgtcccaagtaatacctttgtaactgagtcattcattaagtggccataatataatcaagtctaaaatcattcctaagggtatctcatagcagaaagggacctaaagtttcatctattaatgcagacaaactggacaaactgagtggtggttaacagagcaggagcaccatcatctcggacaaacaccgccactttaagttccagctccttttctagccttatgcatttcaaggaaatcactttccttctaactacaagcagccagaaagagcagacagtaaaatacagataagacagcttgggcacagagggaggtggtgggaaagtctcttgggtaactgccaaactttaccctcatacaatgggccccagtaaaacagggggccttaataagcacattccttttccttcaggttcactaagatagggaagctaaaagcagactcaggaggatgcctgcagctgcatgaagatgtatgggagcagacatacaactctccctcccagataagcacaacaaagagacacagaagcagtccaatcctctaataaactctctcaccctgaatccttaaaaactcttagtctgtaagacagtgtggctctgacctaactcagccagaagtccctctcaggttcattttctaaaataaacctgtccttgttgactggagagccacccttcatgtttctctcctctttctttaattcttacagtggtagcaaattacaatttgtgcatgtcttgcatattagtataagggtgcctaaataattccaaaaagcagtgttactgtcagccatttgttaggtatgttagaaatctagatatgcctaatacatattagagcaaaaagcctaatgtataatagtgatagaatcattaaaccaccatttatgtaagtagctaaagaggcacaagacattaccctatgagtccaattttgcttttgctctggaaactgcctcttgaaaattttgatgagaatttgcatgccaaaaatatgtaaatatgtagataacaaaaaagactgccatcttatttttgaaaaaatggacagaaatatttaaaattaaatacaattaaaagctttatcatttagtcactaaaagggaatttattttgcagctattaacacagaaaggagaatctgatatgtgtgtcaataactactaaaagtaagctttaaaagtataatttccaactaaatccataatgatcagaatatatttatgacaagaaaagatacaagcaacaaaggataaaacattctatccattcttcctctacagtcccttttatttcaggagagaacttcagtttagatcttcatagactcatgccagactattaaaatttgtcccctaaatagttttccttgcttcaatcacattaatcctctcatttcctgttcaaaacctttactagttctcaaaaaaaaaaaacaaactctaaactctttggcctagcatatagttggtaccaatctatgtttccaaacataccacttcttctttgctctcattaaatgacaccaaccctcctccactccacctccagacccaatcacattaacaatttattcctgcatttcctcataatcttaggcttcctgaagtcccctctcctctcccttatgcccatatacctgagttctaccctcgacgctaggtctttcacaacactttcctcagctaggccagagtccatattgcttacaccaccagcaatgtcctttgtatacaccatctcctagacaatagttattctagtatataatttatgacttcatctgtactgcgaaacttaaggatatttcttttaccacttccttatagtctagcactttttaatccaacccctaactcccaactattttgatggccagagaagtatctttttaatgcaggtattcagctagcatctgttaagtcaaaaacacataatagcaatgatgcatgaaaattaaaagtgaattattccttaacagtatacaaacaatttggaccagataagatttttgagaagctaatttaaaaaaaattttgagaatttagaatccaagatggaggacttctaagttgcttcttccaacagaaacggtgatgagtttgccctggacaacatgcttttccagtgtgccccagaggaaactctcagcctatgacaattcactgtaaatgcctgctcacttgtctgtctataccacccaggatagcatgttccatttctgatctctaggttatcaacaacccatgcagtaggaactcatcaatgattgatttagcaccatgattatctaaacacaattaaagaataactttaactaggtgcataaatgttaagtaaacttaatttacgactgtgcaatttcaaatgagacgtatggttgaaattctaaggactagtttatataagcattaaccacaataacaaatacacaaacttcaagataaatcttatgtggacatatgtgtgtgcatgtgcatttcatagaacatttctagaagaaagaacaattttggagagaaaaaatgaaaaatgggcacttgggaggctgacgcaggaggatggcttgaagccaggagttcaagaccagcctgagcaacaaagtgagactcccatgtctacaaaaattaaaaaaaaattttaaaaattaatggggcacattgttgtgtgcctgtagtgccagctacttagaaagctgatactacagggaagtattgcttgagcctaggagtttgaggctgcagtgagctaggatcttgccactgcactccagcctgggcagcagactgagaccctgtctccaaaaataaataaataaataaataaataaataaaataaaaaattaaaaaagaaaattttctactttctactcatctgtgttccttttctttaaatcatagaacgtgtataactttccagttaactcctttctgcccaccctcaccacatggaaggggtagtctaatggtagttataacatttagcatcctgttagagtgaactaatagaaatgttagatgttaagagctgagtaggaaagaaaacaaagactagacagtgaggatttgggggtccaatagggagactttatttttgtggcttaatttctatataacaatagacaaactccttctacttagtacctcctaatttaaattcttctttcatctatgtgtccaacacatctatatattaaaggagagaactacccatagccataatccatctttccaagcagtaaaaataaaccataaaactctcttgccaaggtacaagatagcaataagaaaagcttctcattagatgttccataaaaagaagcagctcctggccaggcatggtggctcatgtctgtaatcccagactttgggaggctgaggcgagcagattgcctaaggtcgggagttcaagaccagcctggccagcatggtgaaaccccatctctactaaaaatacaaaaattagacgggcgtggtggcagtgcctgtaatcccagctactcaggaagctaaggcaggagaattgtttggacccaggaggcagaggttgtggtgagccgagattgcaccactgcactccagcctgggcaacagtgcgagactccatctcaaaaaagaagaagaagaagcagcttcttctctgcagtgactttgactaaaatatatattttataagttaagtgctcagtacttataatggaagttgtacactgaaaaacatctgggcatcacacatctactctcctttcttttgccagagtaaagaaacctgatcttctgtggaagaccatgtgacataagtctcttagaggcagagaccatgttgtgctcatcttcatacaacaagccactaaaataatctagcaaatagtagcctcttagtgaccactggttcagtgaacaacattttctcaaatagtatacacttatagatatcaacagaataacataactctgacaaataagaaaacaatagtttctatacctactggattgtcatttttacttacaaaatatatttaaaaataaatgacaaaggccaccttgatgaataagtgactcagaaaccagtttgtttttgtttttgtttttgtttttgtttttttgagatagagtctcactgtcgcccagcctggagtgcaatggtgcgatcttggctcactgcaacctctgtcgcccaggttcaagccattctccagtctcagcctcctgagtagctgggactacaggcacacgccaccacacctggctaatttttgtatttttagcagagacagggtttcaccatgttggccaggctggtcttgaactcctgacctcaagtgatcccccacctcgacctcccaaagtgctgggattacaggcacaagtcaccgtgcccagcctccagtttggttttatactagcccaggaagcatttgctgagctactctagtgaactgcaggaggtatgagatgatgctattaaaagagaaggttggaggtgaggtggccacaggatattgggagtgggtaattctcagtcctgtcctacttccttcaggccaggagagctgtgtacacaccttgacacagtctagtttatatgtctgtgactgaacagaaaaataatttttttttcttccaagaaccaggaatcctatttgtaccttgcagtgtttctggaatacttcttggggtctcatcttctctctaccttgcaaagatgagcagaatttgcttttcctaccattcctgccatctggaagaccctctttatttcattccttctagtaaatagccagtctgtgttcaaattgcatgggaacatgcatccttgatcctttgcctccccctcttaattttcttcttctttagttcctgtcccaagatgcatttttctacatcgagctcttgtttcctgtattttgttatgctggctacatcatggtcactcactgggtgggagggaaattcaggatcaatctcctcaaaatcacaaagaagttatagttctgacaacaaccagactctcatgacctttatattaatgcagtaaaccacaaaattatttcaaagttatactagcagttattttaaaaggaggcagatagtttagagaaccttccagatttatagaagttttagttattaaaactagataattcattccaaatagttttaatactttctcaacttcaagttcaaaccatgtcgccaaaaaaaagaaagttgcaaaacagcaatgcacttacctgagggtatggggaagtcctggattttgactttgagctggagagccgggatttggccccctttctgttgtcagtcatggtgggggtggagctgctggtataggagaaggctggtttggaggctgagatctgatccagggagagctgcagccctttgtattctgtgtctctgcagggtgggaggacaaagcccttaatcagccaccataggaaatggattcatgcatactctcatcaggaatgatagtaatccgaatttgaaaagaaggcaagcaaaagttagccctataactagcttccacaagcacctggattattctagcaaggcctaacatttaactagtgtgctgataataatgtatttttcattttttttcgttaagtggaaaataaacacataattcaaattctctgaacttctgtgagctctttgatgagatatgaattaaacaacctactctacaggtttcttatgtggggtggttatctgatactaccagattattggtagcatgtctaccaccaatataaggagaatgtctactttcagctgttctaggatcaatcattctggtaaacattcaaagcatttttaaagttagctaactagtttaagcaggattataaatagttaaaaattcctctcaacaggttagttcagttcctttaggtacattttaccaccgttctttccattccttcgtttattcaataaatatttattgagttcctaatatacaccagactttgtgctacaatacagggggatgtaagaataaataagatacctataaaccctgcccttgtgtggattataatatactggggagaagaaacagtaaacaaataaacatatataataactgcagactgtggtatgaagcttatcttaggaagctcattgcaaaggtatacttgagatatctagagcctgaagatgacagccttggcctgcccatagatacaacctctgctggcttctagacagcagcgagtctcatcggactcctcagttttcataagaggatattaaccctttccactggcagccaaaataaaatgttttagagtcttctttatgaagactcatgggagaattttctctcaggtaccagaactcgctgggctgcccctcggtaattgatttattttgatctcttgaacactgtgaatcatatagctcctcacgtttccctctttgcactaaaatcaaaagtccccaagccctgagtctgatttataatcacttctagcaagtgtacaaagtcctcacggcatgcactttgtgcaacaaactccactggcttcttttatttttcttatttttcactttctctgattctctaatgggtttgccttttaaaattttttacatgcatttttaatagtctttggattgagaagcatataaaacctgataattttttttttaagagaagtgtctcactctgtcacccaggctggagtgcagtggcatgatctcagttcactgcagcctccacctcttgggttcaagcgattttcttgcctcagcctcccgagtagctaggattactggcagccaccacaacacctggctaatttttgtatttttagtagagacaggggtttgccatgttggccaggcggtctcgaacttctgacctcaggtgatccacccaccttgacctcccaaagtgctgggattgcaggtgtaggccactgcacccggcctaaaacctgataaattaataaaatcatatatgtaaaagtgactggcacattccatggatcagcaaatattcatttatcttcttttctttgtccctattggttcttctatagcaagatcaggcaaaagcaaaaatataattcagtacttgaaaatcgctaatagagtagatttaaagtattttcaccacacacacacacacacgcacacataatgatgaatatatgaggtaatgcacatgttagtttgatttagattttccacaatgtatacatacattgaaacatcatgttgtacatcacagatattcattttttacttgtcaatttaaaatggacaaaatataattcagacaaggagtctcttaagtgagtaagaatagaaaccagctaaaacagctgcaacaatatcactgccaccaaacacagggcaatgatgtatatcagcaaattacgatggcttactatcaaataatccatccactcaatgcaagctttcttttaaaaaaatgttcttctacataagcagtaaaaatttagaaagtgaacctgcagtttgtctttcaggcttgggaagtccgatctcatcactggtctactttttagctctaatcaactccaaggaccatatagactctgagcactctgtcagaaatgcaatatcctccaaaatgtggctcccacttatttttctgacaatatttcaaaatttcccttcatctaccccttgcttcatccaaacagttgtccctgaattgactttaaactctcttggttcttcttaacctgtaaaactcttcttaactcccacttgcctctatgaagcccttcctgactgctaaagctatttattcaatacatatttactgagtgtctcttctgtatggggccctgttctgggggcagggagacatcaatgagcacaaggactaagttcctacccctcatgaagaaggtaccagggccagttcctgagtattttggggaaggaacaagaactatccttttccacctctagccttacttttcaagtgattatgtcttatctttctcagtggattctaagtccctagaggacaagagttaagagatattttattatattccaatggtcatttgcacagtatttcacatagaaggaagaggcagaagacaacaaggatgaaactaagaaagattgttttccccagtgaccactaataacttgcaacccaatatcctttctgcatgagaaaaaactcagatgggctgtgagtcctctgacctacctgccattagacatcagtgagccaagttaactggactctaacaggaggtagagcctccactcttgggcatttcctgtgtcaaatgcacttccgttcattggacaatagtccagtagacatttagttcctgcttgacaggatctagacagacagtaagaattgtgcacccatgaaagtttggccaaataacttggtaaacccattcctaatgctgcatctcagcccagggattttatggctataagcagtgaataaacaaggatttatttttctcttgcacactttcagaccccacccccctcccaccccccgcccagggtacgcatctcactgttgaagaagtcttaccaaaatttttacatggcttctaataacagaaatacttcaaattaaataggtttaaataacattttaaaccaagacatggttttaaatttcacatattcacatgaaaactaaaaaatataagaagagttatacaaatactcttaatacaaatatcaatgctttggtacacattaaaaatacaaaaataatccaccaaaatttaacggaagaccatgatggcaggttgattgatcagtggtttaagctaacctctgcttctatgtataggcctcaatttcttttttgtaactcatatggatttggtgaatttttttattttgttctgttttgttttgtttgagacagggtctcactgtctcatccaagttggagtgcagtggtgcaatctcggctcactgcagcctcaacctccccagctcaagtgatcctcccacctcagcctcccaagttgctgggactacaggcatgcaccaccatgctcaactgattttttttttttatttttggtagacacgagatctctctgtgttgcccaggttggtctcatactcccaggctcaagcgatcctcctgccttgacctcccaaagtactgggattacaggggtgagccaccatgatgagccttggatttggtgaagtttagatgaaatattctgtgaaaaactcaaagcacagtgcctagaacatagtaaatgctcaataaatagtatcatatcctaccttccaaactgtgtgacaatttttggcacctgctttccccagaacaatagtttcactttggtagtgattacaacacatttcattataaaaaccttttgctgtatttctttcctttctatccctgatatggtttggctgtttccccaccgaaatatcaacttgaattgcatatcccagaattcccacgtgttgtgggagggacccagggggaggtaattgaatcatgggggccagtctttctcatactattcttgtgatagtgaataagtctcatgagatctgatgggttgatcagggatttctgcttttgcttcttcctcattttctcttgccactgccatacaagaagttccttttacctcccgccatgattctgaggcctccccagacatgtgggactgtaagtccaattaaacctcttttttttcccagtcttgggcatgtctttatcagcagtgtgaaaacggactaatacaaacctagaccatttaaatttactctgttactttttagcttctaaaatctattgcagtatggccagaatactttttaaggtaaattctttattgctaagttagcaaatggggaccttatgctcacagtcactctgagaggaatttggccttcctgcttctctgttcaaaactccaacagctcaaaagatgtgctaggatggaaagcacaataaaaaatacccacttaaagccatttcaaatacggttgatgtgctgccaagagtgaatctgaatggcagattcactaagaacaaagcatttgttttacttttagaattctattaaattgagcgtttcatttgtatagctttaagggctagatgctgatggaaatcacattatgagctccattttcttcctcctaacccagacacaaattgtctggccctaccctcttcctttcatttggtgaggcactttctggtatcacatatgtcctcaaagttacatgcatgctcagtagaatcatgtatttaatgcttcctcatggagtggaacaaaataaaatactcagctgcacagaacttagactcttaaatcagtgtggtaaaaaatttgacttctctgatttttctaaatgaaggacagcactgctctccttctaaagttttcttgaaaagtgccacacaaaccctgtttggggctccgtaaggtaactttctcaagggcagttcatgctgttctctcagacatgattggcatatggaaaggaactgtggcacatgccatttgacatatccttcaaaaggctactgaggaaaagttacatttttttctcccttcaatgatttgtagagagctccacacatcttcaggtgcctcagctctgaaagcagtctgaaatgggaaatttgcaatcactaggaattgcagcttgtcaatctcacccatatttgcacagaccaaagtaatcctcttattccattatgggcagtcagaaatcattcaatttgcagaattaaccatctgagtctactttaaactttataatagtcatgtacatatttgaaataactcaaattccaatagagaaaatggggccatttttgtatcattgggcttcctcatccttcccttaagcaatgcaccgtgaccactcatgaggcaaatgccaacatgccgcatgggaagctcagcgtgacacccttggaaagccaatagaaggtgtcttcaccacaaaaaggcattgtcagttctagagaaatgcattaacattatttctatcatttcaactgggagaatggcctccataataccaatagccaaactaatttacaaagaaatgtggaactatttacaatttcaagtgagtttgaatgagtgtacagagaaagcaatcaacagtattttatcagttcttgttgattcaagattatttgcaagaacttttctcttccaccccaccatattccactttcattttagattactttatttttgcttctgtcatgtcaatttggagtctgctggccaatctggagttctttgttggctttatgtcatgtggcaattcttaaaagaggttgccagatttcccgattgagctatttttttaaacagctgaaggtgatcaaattaccaaggaaacgtggaaacaaagacatacaattgatttggctccaaaggcgctgattgaaataagcagaggattgcattaaaccgtgatcggattaggtgggaatgactgcgccttacagtaaactttttaattggattctagagtcactgttacacgaagtgtatgaccttctttatattctggcagagttaccgcctggccactgggtaaacctccgcagcagagagacctactttatgtttcattttcaagctcctatggagcccagcagagagagctgacaaggaggaatactgcgaggggctcacagactaagacaatctgctgggaaattagggtaaggcacccttggaaatgtaatagtctcatactaataagtggatttatgtttgctccttgtagttttctccatttgatctggtgattttaatagttttcccaaagtctttggttttacataaacatacattgcctctgcctagaaaccatctttcttctccactttgaaggtttcatccaacatgctatggagtggatggcaccacaagggtaaggaatggttcagacacaaagtttgctatcacattgtaatttcaagaaggaaagacatgagtgtaatcaacaggcaaacaataacagccaaaaagtaaggcaaaaaaattgtgaaatgttgatatgtggcaaagtcagtcagcctcataacagagattgtgtaataccttcacaccaacccatgaaacaagtggaaatatagctaaatccagacctgccatcacactacatctaaatttgtttcctcacccctccaggccacagtgatttctcccagctccttcctctgagttcctataccattcactgcctcaaccactcatctagcatttctaatgttctgtcttacagtgtggtggcttcatatcttgatagcctctttctaaattccttctcttataacagcctttatttactgtctagacagtatctcacatagaacagatgctcacttgcaagagattaacaaaataattatcttttaataaattttgcttatctcaaatccaaatgaataaaagttcaaatactggtaaatatatttatataaatgagaaagagatacctactaagtaagtgagtttatgtgagagattcttaaattctcagattataattaataatgatcattctgaagttctgtgaggtcttaaatttaaaaaaagcaaatcatgttttcctgttatgcacattaataaaaggtacttatttttatgaaattataattcaggctcagcatatgtgctacttagccaaactggaattttaaattaatttcatcctcaaccatttatttggactattacagttgtattgaaggagttagaaagatagtgttttagatgcccagagaaataacttctgcaaatcaataataaatacaatatatctacaatagaaaaataagaaaaagatatgaacaatgcacaaattgctgagaaacattttttaaaggtttaacctcatgagtaaaatgaattaaagcagctatatgaattaaagcagctaacgggtgccttttttgctttcaaattagcaaaaaattttaaatgacaataaatccaaatgaagataaggtgaaatgaatggacatgcttatatactactagtaagacagtaaactggtagtgtttatcaagagttttaagaatgttcataccttaaattcagcacactagtccccgccttatccgagggagtacattctaagacccctagtgggtgcctgaaatcatggatagtgccaaaccctatgcctacattataggaaatgtatgtataggaaaacacacacactttattatatacctataataaagtttaattttaaaatagggtataataagagattaacaataaaaattggtaataaaatagaacaattataactacatgctgtaattgcatgtaaacatgctctttttccctctttcttaaaatatctgattgtattgcactcacttattgttggactacagttgacctcatattactgaaaccacagaaagcaaaactgtggataaggggggactatggtaattccacctctgggaatatatcttataaaaataattagaaataagtatcaagaatctgtatacagggctgggcacggtagctcacgcctgtaatcccagcactttgggaggccaaggcaggtggatcacttgaggtcaggagtttgagaccaatttggccaacatggtgaaaccccatctccacaaaaaatacaaaaaattagcctggcgtggtggcacatgcctgtagtcccagctacttgaggggctgaggcaggagaatcgcttgaacccagaggcagagattgcagtgagccaacattgcaccactgcactccagctgggaggacagagtgagactctgtctcaaaaaaaaaaaaaaacacactatatacaagggtgtttatcacagcataatctcttcagtttaattataaataatcaaataagaagaaccaacaataatagaattactaaattatgatatatccatgtgataaaatattatgcagttattaaatattttgaccctaatgacataaaatataccacaataaagtaaaaaattatctctctttgacatgtactgtatatgcatattgagagataataaactaaaacatttagttagtatttgaaaatgcattaaagatgtctttcatcttctctttaaacatctctgcattaccttaattttttctctagtatgtgtgacttttataatcagcaaaatatttctttgtaaaaaaacactaattgagggaaatttcatgtactttcatttcatattaaaactttctttacatttccagaatttcttctttctgtatattaaattacaaaagagaaagcactagcaaatttcttttctcaaggttcagctcctcaggtataccagctgtaattttaaaatatccacatgctgtctcagtgcctgcatgtttcactcactttctgatctgtttaccaccgttcctaccttatagaatgatctgtctctgaagcctttcatgtgagctatatgactttctgtttccttcttaggagaatataatttaaattattaccataattgaaaaaaaaagaaagtcttgtcatgtagtttcttaaaacaatttagtgtcatgtggcttataaatggtacatttgtcattgttcaaatgaagtaaaccctaatgtgggggccacatttcttgttctgagggactttattatgctcagaaattcattccatatttagctactaaagtttaaacatatttgtgactccttcaggttgaagttgtacattcgacagatctgatattctttctgtttcttattttcttggaggctggaggagggtgttggtctttaatagttagatctgaataaacacaaaatatgctgccctttcaaatgaggcatatatttaaaattgtcagtctcttcttccacaatctaaacccctaattgtagcccacttctagaaaagaatcaaatataaagaaaaagtaatattaatatcatattaatatcaatcacatttatattaattcttttattttcaaaaataggaaataaaatacacatatgttattcgggctgcctcttttccattatttcccacctccccaccctctgtgtccatccccctcaccagacccttcactgtcatttattaagctaatgtttttcaagtgtatgttccctttaaaagtcttccaatacctaagaaagataagtaatggaggatcccattactgaacaccttatatttggttgaggttctgttatcacagaaacagctttcctatctagttcttagcaaaactgattcctaaaccctaaaagtatcctctggtggaggggtgaagggagcatacctcctgttttcagctccacacaaactccaggaacaaaaaaaatacctgtaataataaaataattttccacaacactgggaaatttagaccccatacccaaggccacagagtccccaaattccccacaggatctcacgtggggagaccccataaggccaaacctcacagcacggttggaagctctgcccttttctgtacaacacaaagacactggcatttctgtagattatagaaaaatagagcctcagattctgaactccccaggaaatgacaccgcaaaaaatgatggcatgatgcaatgttttcaaatgcacaaatcttcatttgtttaacttaaatattttaaaatatgtcctataacatttattcttgattaaacctcttctagatagttaatcattaatggtttctttacagttgctgtgcaaacagttcattcatacctatgacttatcaaatctcatagacatgttctttaattggattcatttatttctaatctccttaaagcccttactactgtaatgcttggctaaatatacattaaactctattatttaaatgactaaaataaatttgagatttattttatgaataaaaattcacaattcaacaaatgtcctaccattattagtagtattattctgtgcttcagtattcagacattattttaaattgcctggtagataagttgtgtttaaacaaaataagttctgagtatttgctagagattttggattgcccactaaaacaccaaaattttcattgtctctatccttgaagtcagagaacttgtataatactacacagaatacgtagttaacaacagagcccgttaccaaagacagaataggcagcagcagcaggtttttatgatttatagggcttgagaaagttccctggccatgacgaagatgtctcaatagtggtccaatagctgatgcttaaaatgcgtttattcatattttaatctatttgtcttaagccgatggcccagaaagagataatagtagggctggatgagtgatggctcattcattggccaaagtgggaggattgcttgaggccaggagttcaagaacagccttgacaacatagcaagaccccatctctataaaaaataaaaaacaattagccagacctagtggtgcacatctgtaatcctagctacatgagaggctgaggcaggaagattgattgagcccagcattttgaggctgcagtgagctatgatcatgccattgcactccagcctgggtgacagagtaacacactatctcttaaaaagagagagagagataatagtgtatgcctcatgtgttatcatttattgattcagtttatcagctactttcctgaaagcagtagttctaaaacttcagcacgcctcggaagcacctgaagagtgttaacacacagcttgctgggctgtttcccttagagtttctcatttgtaggtctggggttgagcccaacgatttgcattcttaacaagctactgggtggtgctgatgctacaatcaggggccatactttgagagctaaaccagttgttatctgagtggttgttgttgttgtttaaatgaaaggaatcagatgaaaggggaccacagagaagataagaaaccactgaaaagggagggttccaaggacaaaattcaagcttcacactttccccaaggcgtacctcactgcatatcttccactgaagtactcccacccctacttccaactgcttacttcctcctaacctccttttgagtgcctcttacttctgcagaccccaaaacattgcatagctgcagggtttagtcttcaggatgcttcttttctattaacacatactctctggggatctcatccactctgctgactttaaattccatacactgtttacccccagtatctaggccagtcctcccaactccacagcaccccagattcaactgcttacatgacatttccactctgacgaatgacgggcatcttgaagctaaacatgttgtccacacacaaccctcattgctgcctctgcctgctaaactgttccttcccaccatttacccaagttgctcaggctaaaaaatctaggtgttgttcttgactcctttcatcttctcacatcccatatccaatctatctgcaaatcccattgggcctaccttcaaaacatatgccaaatctgacccctcaccactaccccatctttcaagtcatcaccttccctcaccgaggcaattacaatcatttctcaatggtattctccatctccaccatccatactctccaaaccagtcagaatgatcttttcttatacaatcagatcatgtcatgcccgtgtgcagaattctccaatggcttcccaaaaccttcaagatccaaggcgatctggccctgcctattcttctagcatcatctccttccattcttccccctcccttactcagtggccaccacagtgaccttctctgttcctcaacatgccaagcaggtttccacctcagggcctttgcattcacttccctccatcgggaatactctccctgtaggactccacatggctggctcccttccttcatttatgaatctttagagaaacctttctgaccatccctacctctttgtcctgcttaatttttctcctatcactttctgatattatatgacttttttatttctttataagtactttataagtatattaaaatttatactcaaattagccaggtgtggtggcacatgcatgccatcccagctactccggaggctgaggctgtgggaggatcttttgagcctgggaggtcgaggtgcggtgaaccatgatcttgccactgcactgcagcctgggcaacagattaagacccacccccccacccacacacacacacacacacacacacatataatgtatattttttacatatacatatatatttaaaaacttacatttcatgagggtagggactttgtctctttcagccacactgtagccctaccagggcctggcacacagtaggcactagggaaatatttgctgagtgaatgcatgaaccatccccagcttgtcatagagatgactacactctaaaacatttcttaccgttaccttaattacaacaacagagattaagctgattctaatgatagaaatttgtttgtaatgaaggtcctattgagtcaaccaagaagagacacaaatagaaaagagattattctgtaaagtgccatgtaacgtctgtaaatattttcttcctggttttcaattagccttcacaataaaatgctatcctgcacgttgctatttctttaactgctctaattggaggaatgaaattgacacccactctgccctcccctttgtgggcttcattcttctagcattcctgagctgtaaccctgcaagggtccattacccaaatccaacacaacaaatacttcactacgccaggactgtggtaagatttcaacagtgaatataaatgctgtgccttccaacactattagtctcttaacggcctatcaaaattaaaatgaaaaactctgtgttgcatttggcttgatctgataacaagcagctctttgcctgtcgcttgtttggacaccaatatcaattaatgggaggtactgaaacaagtgaagctcctggttcagtcacaagaacacgttatagtcattacaagcacgagagtaaaatgaatggctgaagagcagccgcaaacctgtaagaatgctcagaaccagggattctacctttgttaacggttttcagtaggaagaggtgagagacagcacattctaagatcgcattttaccagagaatgttgctattcttggagagatgtaaaaagtggcaagggacttgggtttaaaagcacaaacacagagagaatcccaccttaatgggtaccattatgatatccagttcaatataatgaggctatttctacaatctacccatcagcccatattagcacgctttactgatgcggatacaacaaattctgtttgaacaagaaatccctggagcgggggtgggggaaggatccattcacaggccctatccatttagcaatcaatcaaagaaaaaatattcttctagtaaagacagcagctcccatttgaatcctcgtaaaatattaaatgttctaaataaaataattttctgtgggtgacacgttgattgttgttttgtgaaaacatcatgactgttgatgctaaaattagtgaagaagagatgggctcaggatatcgactggcaattgagcaggtcccaagtatacccaaactctgaagaaactgagtcactttgtggagaccccatattaaaaaagagagtaaactgtccatagaccatgcaaaatattggcaaaatgtcataaatgactatgtaagtattaggtggaatcatatgaaattgccaatattgaactgttttaatgtatagaagtgacaatttcatatggttcaccctaaaacagcattatccacttaaagaaagcatgccaaagaggaaagcaggtggatgctggagtccagaccctgggttggtatgctcgctggaccactcactagctatgttgtattggctgagtcacttagcttctctggcctctcacacaaagcagccgcccttcagatgtgagtctgtcttactcctcagccttcctaagcatgcaatgaacaaaacaatgtgccacgcctctttcagcttagagctaacaaccacctcccagtctctcccagacagaggaacaatacctgagaattacctcttataaaagaaaaaagaagcaaaaaaaattataaacatccaaaataattgacaacatatttcaaaatgtaatacatctgcaaagactattttgaatctagaattctttaatttaaaaattcactgagattcataatcctatcagaactcaaaccccaaaattttgaaaaatcccatctgcagcaggacaaaacatcattccaacaggacaaaaatcaacacaactgctccctctccctgaggcaatgagataaacagggcccaccctgggtaacgtccttgagagagttaaagttgaactccttaatctgtagccagttaccttgctgccagtcatgaactcccttaccatacacatcacacacacacacacagacacacacacacccctcccaaggtgcccaactcctcccactgtctctcctccctacctactatctagccagaaagcagtctaaccacacctgtgagctcatttttcaggagtgacccaaacagtgccaaggtgctttaggccctcttccttctaattgtgagtggacgtactttcctccataaaggcatctcagttaccagcaagcccacagggaaatcaggctaggatacagcttggacatatgcttatttcttttccctacagacactgtcttactcattttgatgtcctctgaactgtgcacagtgcttggcacataataggtgttcaataagccttttatgaatgcttaaaggccactagtcctaaccaattgaaggaggatctttccagatgcatcaagataattgctgatttcttgttcttgggccaccatctgcttcctaagactcatgctttccctccattggtccaaagactcacacacatttattttgtgttcattggcaagacaaaaattattttattcaatttcactaaaataaccactgtaataattcacatgtactcagtgttactttgtgttgggcacagggccaccaaccttacacatgatctcattaaatgttccaattgactctatgaggtagaacccattattacccgcatcttacaggtttttgttgttgtcgttgttttttgtattttgtttttgtttttgtttttggtatttttttttttttttgagatggcctcttgctctgtcaccaggctggagtgcagtgacacgatcttggctcactgcagcctctgcctcccaggttcaagcaattcccctgcctcagcctcccaagtagctaggactacagcccgcaccaccacacccggttaattttttgtattttagtaacgacggggtttcaccatgttggccaggatggtctcgatctcctgacttcgtgatccacctacctcagcctctcaaagtgctgggatgacaggcatgagccaccacactcggcccattttacagattttttaaaaatagagagatagtgtagttaagcaatttgtccatagtcactgggctaatgagtggcagtgctagggaacggacaatagactctacattctagagcccaacttcttaactaatatgccatgtcacaggataaaatattatgatacctcatttgataacatatttttcaaataccttgtaatgcattcctatgtttttcagagtttgaaacatccaactaagaagcctaaggtttagactgcatcatattctaataacaacaggattataatatcaaatgagactctctgaccctgcaaatctggaaccagctgtatagggactttgaacctcccttttctccaatctgctggtgtttgtcatcctaatatatacctcatattttctttctgaaaataatttttaaaatatacccatcatacatacggcagcacagtgtattcgtttcaataagatttacattcagaatattgatatccaaaaaaaaaaattttaaatggtgttgtatgtctagatgctaaaaagaaaaaaaaacatatttattactaaagctgggtgaacttgttaattatatatcagtaccaatttgggaaaggcaagagactgtgcctccctggcacgaagaaggtgctccataaatgctgacgtttctccctctgcatggaaatctctgcttcctttagagtatcaatgacaacagtgaaaaatagagtgagcctgaccaaactgcagaaatcaccacatacaaagagcacaaagcttggaggtttgtgtgttgtgggactggggaatggagagaaaataaacacctaaatgtgtgggtttgaggatatagagaaaatagtttccagtcctgatgaaacatgctcagttctggatccccgtctctcaccttgtacaaaaatcaactcaagaaggatcaaagacttaaatctaagacatgaaattataaattctagaagataacattggaaaaactcctctgaacatggatttaggcaaagaattcatggctatgaccccaaaagcaaatgcaacaaaaatgaaaataaataaatgggacctgattaaaaaaaagcttctgcgttgcaaaagaaacaatcagcagaataaacacacaacacacagattggaagaaaatatttgcaaactgtgcatctgacaaagaacgagtattcaaaattttcaaggatctccaacaaatcaacaagaaaatacaaataataccatcaaaaagtaggcaaaggacataaatagacatttctcaaaagaagatatacaaacagccaacaaacgtatgaagaaatgctcaacattactaatcatcaggggaatgcaaactaaaaccccagtgaggtaccaccttacacctgcaaggatggccataatttaaaaatcaaaaagcaatagatattggtgtaagtgtggtaaaaagggaacactttcacactactgatagaagtgtaaattagtacaatcactatagaaaacagtatgggcattccttaaggaactaacagtagaactaccatttgatccagcaatcccactactgggtatctacccaaaggaaaataagtcattatatgaaaaagacacatgcacatgcatgtttatagcagcccaatttgcaattgcaaagatatggaccaatctaagtgcccatcaaccaatgagtggataaagaaaatgtggtatatatatactgtggaatatcactcagtcataaagaggaacaaaataatgtcttttgcagcaacttggttggaactggaggccactgttctaagtgaagtaactcaggaatggaaaaccaaatatcatatgttctcagttataggtaagagctaagctatgaagacccaaaggcataagaatggtataatggactttggggcttccaggggaaaggttgtgtggggtgaggaataagactgcatattggctacagtgtaccctgcttgggtgataggtgcactaaaatttcataaatcaccactaaggaatttatccatgtaaccaaaaaccgtctgtacccccaaaactattgaaatttaaaaaaaagaaacatgctcagtttcaagaatgaagttcaaggtgaagaatgtaaagaaagagagaaaacctagcttaaacaagagcagtgagaccatcactgtttgaacctaatttgaagagtgatactaacagtgttacaaggagtgcttactgggaaaagaacaacatgacaaatgtatataggtcattgacccatctcaaaacactctacttctgcttccaacccttaaaattccatcctttccctgatagctctactgtcactttgagctcctttgtattctgtgtccttagcaaatggtgcaagtatactataacattgcaaactgagctaatctgaacttctcaaagatttcgatggaactcttctatttcaccaactaaattgtcaactgcttgataaatgctaagattcctacttcatgtaatcatgcaattaatcattgcaatctgctatactctgtgaaacactggtatacagccacactcagtccatgtagaacaatgaggaatatacaaaaggctccactgaacaccatcagaaatgtcaatgtttggtgttttatgcacattaaattataactattggtaaagttgacaaaacactgattccaactaaattaccctagatatttggttagtttcttatgatctctttttccccaagaaactaacctatgtaaaacaccttccacactctctagcacaaagaaagtgctcaataaatgctgtgttttctccctctacatagaaatctctactccccttagagcatcaagactacagtgaaaaacagggtgagcctaaccaaactgcagaaatcaccacacacaaagagcacaaaacttggaggtttgtgtgttaagggataggggagggaagagaaaataaacacctaaatttatggatttgaggatacagaaagtcaagttaaggagaaaacaatgaattctctttcaaagtattttagttgacattacataattggcaagagctaataaaaacagctaagaaatactaggcacctgctttctgtcagatactgtgctatattctctctctatattatatcatttaatcctccataaatccccaaaaggtgggtacgaatgtccccatttcacatatggggcaacagagggtcaaaggggtagagtgatctgctcaaggcctcacagctattatgtagcatagtcttcattctaacccaggcccatctggcactaaagcccatgcctttgtttcacagattgcttggaaaatgatactgtgggtctttataaaaacaaaatcacaatcctactgcaataccactttctggagatggcccaggctcagccagaccccaaacattgtcaatgccccacaaagtaacttctcctttcagttccatgatcaccaaggaggagccctcttcccggccagctccctgtccttgcaatgccaaggcgaggagaaagggagatggagtcagggagtttactccctcaggcaagccagaatgctaaattcctctattgacaggtactcaggaattccaaatttcgtctaaactccaaccaatccttttttgcatgaaggcttaattatagacactagcatttcagctccagtgaattttctatgatcacctgctcatctggaaagacatcataagccaagaacagagaaggaagtattggttaaggtgagagcagtggcagccttttactaaattatgaagatatgtataatccatcccaccccccaccacacacacatcttgtatcaaacataacagtgtttcccatgtgagtagactaagtcaggagacaaaaacatgtttttctggagttcaagtaaagcctcccttgaatttctccatccattcacaataacatatatgggtgcctgccttcatatgaggcagtgatccgtatttttctacaatgtgagtcaaagatcaaaacccttttttcccaacagccagactaagagaaagccagaggaaagtagacaggctggtcattcaatacacaccaagtggcctctacccaggaactaaagggaaactcctatgaatcagtgtccttcaggtcagagcaacaacagaggaaggagtggaggccagagaggcctggggagggagaagtagttggatagtggcagtgccaaggggccagaggatggcacagcagacccaagaatactaggaagttctctatcccaggcctctgaatagaacccccagggggcctcccctgctgccatatatcccctccattctctctcaaaggcagaaaagggtcaattccttcctctcatcccatccccatggggatgtacacacacacacaccatgtaagaaatacacccctgccacagcaggcaatttgcatcacatctgacttggtttgcaaatctactgacatttcggttaactcttttgtttagcaaaaacataaaatgttaaatctggttgcagaaatagaataattagtaatagcaataatgtacttctataatctaggaccaagcaattcagtaaacaactaaaatgtttgcaggctacattttcttcttacaaaatgaaaatgtccttagtgaaacttatggggaaaaaatgagacattcttaattgaatgtcattgagaagatagaacagctaaattttagctaggaaaatgtcaatatctgcgcacccttgtgaagcaaccacaaagaggcagcttcttaatcttccatcattaattcagatcaaagcctatcttgaagttttgtgggctgaacactacaggcctcactcattcaaatccatccctgtctctcagacatctttcccacaaccaccttccacttccacccctatacacagagaacagcaggatgcagtaggagtgacacaccagcttttaattctggcttcactacttactcagcatatctgagcctcagtttccacacctaaaaatacaaaaagcaatctccgacccaaccactgtgcagagccatcaaagaagcaagtcaggtaaccaatgtgacagcactttgaaacagatacgaattcagcatttgtttaaaaaaatacaaagtctgtaagttcatgaaagatgaattcaaaaccaaatacagatccttttgataaaatacaataataaggaaaaagtgtatgaagaataagattatttaagtgagtatttaactggtattatgtatttcaaaagagactaaatctcccagctcttccttttaactaagtgttttggtagttataaaattagtattaatacaaatatatcttcaatttgtttttataatcattaagttacatgaaagatcatctgaaaagaacaactgtgactctgatgttcaatattatcttagtaaagattaaacacaattaaggatcaaatctaatttacgggtatacattagtgcatgattattattttggaagatcaaaagattaagtctatacaaatgctccagagagtaaattatcttatattttctgaagcttgctaagtgaaaaggtgtttcattttatattgtttgtatttatatttttgtaatacaaaagtgattttgctaaccaggaaaataaattgtactccataactatatatgttattggtcaagtttttttaaagcattctctaaaaactcctagtaataataataatatatcactggtctttaaataagtaatttttaaaaatttgaaaacccaaattaacccagcacaaataatgtacctaaaagaggaaagcaatatgaacatattttaatgtttgctgctttatggcaaggatatgtcgggttttatattgacagaatatgttaacatttaaaatcctttttaattctaagaactacagtggttctcataatggtaagttgttgtggttaacataccatatgcaaacaacaacaaaaagtataggatctgcagtaattacaatatagagccccctttttttttcattgacatgaaggaagtactgtatgtcacctttggtatttagcctaacttttctatgaattcaaaaggggtatttagtagacagcaaatgttacatacactaccaatataaattgtctctatttgttctgcttttagtaacacagaaatagaagttttaacatagaaaactacttcctcatatatgttcagtgaatcactctaaaataccatgtgagattttctaggaaagcaatgttccatcctaaacttagaaaataaataagcagagaagctgtctttgctaagaaaaagaagttgagatgttaaatctgtctgattccaaaatttccaaattactcactaaatctattctctctcttttactttccagacataatatcagaattgtattagcttgcaagtcttattagaaagctagtttaaaatacagtatcatttagaactttctatcctacgaaagtctcctcacaaaatatcatctatccatcagcctaattgagatcatacaccaatgagtacttgacgaacattagtggcagattgtttttaacggcaccagtaaactagctctcaactatatttttgcaagctctacacacaataatttttaacattttaaatgtgtcatcataaatgatacagtggctacgcaggaaaatgctattcaaggatgaagcaccatgatatctgtggcttactttgaagtgatttagcaggaaaaaaaatacacattaaaaataggcacacatataggtagagagagatataaagcatatttttataggaaaatattaacagttgttggatgtagatgatgtgaatatggatattcatttacttctcttttaacttttatatttgcaaagtttatgttttaaaatatttttaaataggaattttatactctagtgggttatctttaaaagtggcagaatatttcttattttaaaaatacatgtagtctgaaaacataaatagaaccaagactcttaattttcttagaaattgtttttcatagtttattaggtgttctacattttctttacattaaaaactaaagctttccatctgaactggctatgaataattaataatactaattaaactcaagaaaatatgaattcaagaaaactcacgtaggtctttacacagtatactccatatattctggactttccccgacatccttgttactagacactagttccattcacctaccctcttgaaaataaccagagatcaaggcctgtcatacttaacacttatttcaaagcctgaggatactcataacttataagaaaaatcttttttaaatgtgtaaagctaacagggtatgtgtgtcttgcagaaaattatgaactgatcagtgttttgttttgttttcttttgttttggagcaagggtttaatgaagagctatagaagcttcactgaacctcggagacccagaaaaactaagggaattttcggaatttactcatagtatcttctcactctcctctccagattttcagaacatatggtgggcatacagaagtcagtaaaaagcatcaaggcgtataccacctgcctctaaaatcatccagttttcctatatgccctgttgcaactgcttattaaaacaaggttgctaaataattcattgttgcttttgttagataataataacttattttttaggcatattttaacttcagcaataaatcaggaaattagaaaatcaacgagcttatgaatgttgcctccaccaaaacatcacaacctcatttgaccaaggcttattttaaaacctctactttcatgacatgaaaatccctttaaaatgtatgctattgaaacgtttaaatttgaaaaacatctggcatgtcaaactatttgggagcttgtggttttaagtactttgtttgaggtggtgtatttagaaagaattcacttgtcattctcaggcttcatagggaagtagccctaaaaaacaaatgtatgtggtagttcactacaaccatggagaatcaatagccatctatttaatttgctaagacaatgtaaattagtaacttccagccagatgtgtgatatgcacatcaaacaaactgcaacctgttcattatgaaaatcctgtcaacacacactgagccacttgatgacatttcgtctaaagcaatttccacatttgcagctataaaaattgtcctaagaatttttctacaagaaattgaagctgagactcataaaagggtaatcaatttcagcttttcatcttgtgtgctgtgtatatatgcttctgtgtgtttatttccattttcattcagaggtataaaatgttttaacaatgtgcaccatgctctttttccttctattaatcatgtatttatcctcattacatctttttaaatgtgatgtaaagttgatcatctaattatacagttctgaaggagtatgtaaagtcaggaatgacagaatcaacagaagaagaaatgtacacttatctactggaaaacaaaacagaatatttcaaaatgactccaaacataaattaagtttacccattgggaggtctaacttgcatttggatcatttatatgggtctgtgtgactatataccctgctgtttgataaaaaatgattactaaccacaggcacccaccagagaacagagtgtatgtgtaatgcttgtgatgtctcagacatacaaagcaccttcttaaagaatgtccgtttcctttccatggtaagcggacataatttttcaccctttaatactactgtttcacggagggggctattttatgtattatgctttgccattctctcttgcatttattttaataatatgaagaactgtattcatgaaattgatagttttgtttcatgaaacccaaaatgttggtgaattttgttttgtattaaaatacacagccttcttgatattacaagaattatataatattaacaccgtttactaagataaaaaaattaaaagattattcctaattgccagctactattcttgaatgttgaatcctcatctaagccaaattcattttctaagtctattgaattaaatttttttattaaacaagacacagaacaaatagtctcactgccaagcataatatttccaactactacatttttaatttggcaatttaaaacaacgtgaaacgaatctagtccttatcacctatagtatagtctgattccaaatagcaccccttcaccaacttcctaatgtctaaatagcattctactaagtgcctggtgtgtcaacacttccagcttccaaagtaaacaacccatgagatcccctaaaatcacaagaatttcaacctctaccaaaaaaagcgtggggagagcgcaacagcacacacaagagttcttcataaaggcttcaaccctaagcaattcaacttccacaaacattgtacagaacacgctttcttcaccagccgcacaccaggccacgtgatgagcctgcagggccacactggcaaccagaaacgattattgtttctagaaagaataaggctcaaatgcaggcctctgcagcctccctgtcattcgcgcccgcaggtggcacccagagctccgctcctcactcagtgaagcaattacgccccgcgcggggcctgggcgccggccaagacttgcagcgttctcttgggtcccttagctttctacgagttaaagtcagatcctcctggtcacttaagccccctttgtggttcaggggggaagccactctctcagaactcttaactttgattggagactctggttaaaattaagaacttcaaaccccagatttgaaaaaatgaaacagatgtcctgtttgttaaccataaatgcctccgtacttagatcctttcctctctctctctttctttctgccgcattaagttttatttaatgcagagttcgcttaaaaggttaagagagaaaaagaaagagaagaaagcaaatatggactgtgatggaaaaactcctaaatctttctctagaatataacgaagaaaacctcttcaaaaagatgaaagtgttcgatctgcctcctcttggcgcagccagcactcgagggtcaaaatggcattccccgtggcccgagccttgtctaacccggccgtgccgccacccgcactctcgcagagagcagggtcgcctggggtgggtgaaggggtctcagtcttgcactcacgtgaggacatagttgacgctgacgatacagtgtggcctggaggagcgactgttgtgcacgatggtcgcgtagctctgcacccatacccagccgccgtgtttcgccaggaacctgtagtacttggtggtcacctgtcccttcaccagcactgacggagagacaggaggcagatggtggtgaaccagcctgcctgggactggccccaaatgcaatccctggtggtaagaattgagggctccctgtgggccctaataactgcaccaggcaggagagagagagagacgacaggcaaattcccaaaggaactgattgtcccgtggtattgcatcgagccctccggtcacccttctagggatgatacaggggtggccagatgtcttcaccattagcaaagggaggaacacttagagtttggaggtttcctccagattcgcttttctaactacggaagtaaggctctgggcagctgagctccggcgctcacgatccctgcccgggagattacgctcaaagcaaagctgtatcaaaagccaggcgagtcaacgcaagtgagcgccagccttggtttttgttcatctttagtgtggttcacagatgtgaaaaaataccaataggagagtaatataccttcgccgggggcgggggacgtatttcgcccagaaatgcttcttccgcctatattagcggcccgcggatgttagagaatttaggtgggcccagtgtcggagaagtccctcaggaggcctcacacaccaccaccacccggctccctgggctcccacctgtcctcttgcgagggatttaaatcgtggctcccccaccccctaaccagcggatgcgccaaggttgctagggtacggggcagggtggcgccttacgcaaatggtgcgcgcagcgcaggtggaaggtgtcgcagccgtgcacatggtggtacagagtcttctcaatcaggtcctgaggttcgtaccccgtcagctccgccaccctgaggagagcaatccctgcaggatgaatgcaggcgcgggtgcagggatgccctccccacacaccctcgacagccgtctgacacctagctgtccgccctcactttccagggccgattcagtcgcctcatgtgcaaaatgggctcataggatagacggaaatctctcagtcactaagcagggccgccctcaggctaggagaggccctttccggccctgcccacccacctggagtccagaaagatgagcttcatgtccaggctggcgcggaacataaacatattgctgtgtagcttgatctccgtgacggcgctgggaggcagcgagtggcccacggccaccaggcccacgttttggtagcagccgtcgaagggggacatgtccaggctgtactggcggatcttcaagtagccgctgcagtggatgacctgaggcagagggatagggagggagactcagccacaggtaggaagagcccccaaaaggtggagaaggggttgaaacatgttgaaactctgcttagccccaaagcagtgctgaccacgcccgtgcactaaggaatccaaagttactggtgctctaaggtgtcttaagaaagtgactgcacagccacactgaactcacctgggagcgcgtacaaaatgcagaagcctggccccaccaaccctaacgcatccgaatagcgaagtaggtccctgaaacctgctaatgacgttcaaggacattcaacgtgagacccatagcttcgaattaaagctctggtttctaacctcttatgtaacgctatgcataaactcttagggattcaccaaagttactcgcccattcagaggccttacggacccttaaggcccatctctacgggtcacaagttcatagcccccgcggccacccagtattgggacccagtcagactttgtctttaagcatagtccccagctgttcacaaagttccgtggccctcgtggagagtcctggcctgcggctcttcgacgcaagctgggggtgcccttgcgggtagtcccagaggtagggacattcctcccacgccgcacgcgccttgcttcccgcctcctctgactccacccggagcggatcttccagctacgcaccttgtagccgccacaggtgaggccggcgttacgcttggccaagacgcacttcatcctcaggaagaaggagcgctcgatctcatactctgggagagaggaacgaagggaagctcaggtcgtgtgacaccggcggcgtgggacagcacgcgtctctgccacgactaattggggaaaaaccacaagcggactgcgatgggcctgagcgtcgcaggcatgtgtctaccttaccctgcacgaagtgagagtggtagggttgatgggcggtgagcaccgccgtcatctcgtcgtggtctgccgggtgaatgtattcataaatgctgtttccggtcagctctacctgtaaagaggaggatgtcgccgtcgccgtggcggtggaatgcccggtgaagggactgaaagattaggccaggggatctgcaggaccatgaggacagcagccagaattctggaattggccctgagttccaatgccagctctgcttcttgctacctattgcagcctatctaagattccacttccttgtctatataataataaaaatagcagtaataatgatgataataataatagtagtaatagtagtagtagcaacagcagcagcagttccctggcaaagttctgataaagacatcatgaaataagtatgtaacgtcctctcatgttgtctggcttgacgtagggactcaaaaaagtagccattgtttgggcctagggtggaaggtaaaggagaagggaagtggagaaatggagagacccagaactatttaagagtcttcctgctagctgtgagatgtccagctccaggtttagagaagcacacccagcccccaacccagccccctacccctgcttccagctctggctgtaaacactgcaggtgggatatgtgaaccactcacctacctgagaaagacccaagtggactgaggctgtctctgagatgtacatgatcttcccatctggggctaccacgaagatgaagccatccagggtctggggaggcacaaatagagagaatagagagccctctgggccatctggagaaatgggagcaggaggacagaagttagtgactttcagccaaaagtgtagagagatggagtggagcaggtttggcaggaaacagggcatagaaaactagccacatgagcccttttgttcattctaaatttgtaaacatctggggcatgcagcccaatgggaaagatccagagtaattggtggacaaggctagtgccctgtaagactcaggatccactgaaacaaacaaggaaaatacatccataaaacacacacacactgtctctctctctctctctctctctctctctctcacacacacacacacacacacacacacacacacacagttctagggggaaaaatcacagcctatgtgttctataatggaaggagtaatagcagggtttgggaatagcagtgcagtaggcattggtcagtcaattttggaagggctggcagtcaaaagtttgtagacagaagaaagctggccagtgactctggaaagagtccaggacagggggcgtttaggagatgagaggctttacaaggagtaagtccacagagtattgccatagggtgtatgtgtgtgtaagtttacattgatacatcaaactgacaggctctccatgaaggaaagtcttaagactttcactgtctctatctctgtgaataaggcctcagtccaggcagagacaagaggagtcagaccctgctttcaaggagcaggaagtccaacaggagcaactggcctgaagacagatatagtgaccacatagctgaacaggtagtgctgaataggcagggggcccagagcctgagtgaccggaggcctgggggacaatcaggccttaggggagctgatgtttgagcagaaccttgaacaggaagcttggactggagaagagagaaagagcattctaggcagaaggaatgaagtggccaagtctgctgggtctggggataggaccaatctagtgtattctgaggtgatgaatttggtgtactagagactgcagaggagctaaacctgcaatagattttggagcttgaaatgtcaatttgagaaacctggagttgctctgtaagcactagagttctaacaggtttctaagcaggagaatagcatgcttagatgtggcatttgtttaattttattttgttttgcagaatgcagacagtgatctgaggaggaaggggaggggaagaggagatcagagaaggcagctgcagcagagatggtcaagcctgaaatggggtagtcacaaggggaatatagaaaggggagaatctaattcaaagatggttctggatatggacttcactggtagcagagagaggtttacttcagtgtttcagtgaaggcactaagcagaaggtgacatcattaaccaagatttagtgtgattttgtatgagtagaattctgggggagggagataatgcctccttgttttggagatgctaaacttcaagtgtatgcagatttccatttagatgtgtccagtttgcagtaggaaacaaaaatctggagctcagacggagagtctagactagagaaaccagttggtttcatgtagagaaaggagttgagaggctggtgttgggtgagattacctgggtggccttgaagctgtaacaggagaaacagagctgaaacctaggggacattacagcatttgcaggccaaccagtggtggggaaatcaaaagggagcaggcagagagagagaagaatctgggaaatagtgctattttagaaactgagggaaggagagaatgttaaatcatcagtgtcacctccttcaagtcttagtccaaatgtcaccttctcagtgcggccctctccaaccatctcttattttaaaaggcactactctttcttcctctcctccttatttttctccatggcacctataccacctggtaaactatacactgtaccagtgtgggcttgtaaagctgctctccttagaatgcaaactccatgagagcagggctttccatctggcatgcgattgcccctcctaaatttgcggaatgagtgagcttcattaggataagagatgagcatctaattcttgctatcaaaatgtggtgaagccagtgaagagcatgatgggtgggagagatgccagactgcagggatgagggagtaaatggggagagggtgggccattgaaattgggaatgtaagtcagtcctaccagaaatgtggcatgaagaagaggaaataaattggcaagagctggaaagtgtcagggacagtttggattttgttttcttgtttatgtttctgaggaaaattagttgggaatatgaaaatattgggggaaggacacagggaaatctgatagaagatgtcttagagttaagtgcctttctagataaattcaaaggtgtgaaggccacgtcagtgagagaatgcttgcccaaccccttcctttgtcccacaaaactaaaatcttcttggtgtcttggaaggagaaaggtatagggtagtggtaggaaaaggagctcctgtcaagagatgccactcatgccagcccacagggagaacttgcttagattccccaaatgctgcttaggttcaaggcttccaggagagtagctcccagtgggcttgaataataataataatgatgatgttgcagggttgggacaagcgcaaaatctaaaaatgccaccggggttttgcaatttaaaatatttgttctgtgacttaagtaggcaaagagcaagttaaaactgtgagcactacaaaccacaaggtaatgggagcctagcattggttaaactcattatctgggggtgtgtatgtgcttaagcaaggtcctgcacacagcctgggctggcttgcagtgaaaggcaataggaagagaagagggagcctgggcactacagggacacaaaaccagttgcagatgtagctgaattggaaagacgtgggcttaaagcactgacaggtctttttaccagattcctgttatttcctttggaaatccttcatttgggatggttctgtggccttgcctcttctgcctgatctggggtgttccagttccctcagcccaatggagacaaatggtgccccctcccttggttaggggcctcgttgggctacattccaaacccaacttctcacttgtcaccttgcctccctctcagcctcttgaggcatcatctgcaaaagctaaaattttactttgcagcagctattgggctctgagagggccacgtgcagtccggatccctgtttttgtggggggggttgtttgttttttttttgtttttgttttctgagaaactaaaagctcaactcagggccaggcactcagaccctcaaagcttatgtgttgccggaagacctgcacctgtacctggagcagatgggagcccagttctcggccaacgttgtccagggggctggtccgacttgagtggccccacgcctcgccgagccctgtggagacacagaagcatcctgtagccactgaacccggacctgacaggcagtttgggaccaagtcccgcgactgtattacccgagtgccggcccctttgactggataccataggggatccctctcaaagtggacagcgggggatgggagcgtgtacatttcagtccgtcctgtcagcttctcagcagaggttagatttcctcttctaaactaaaactggtttctcaggccaagggccccctggtaggactccaagtggcccaggctcggaaaaagcctccaacattgcaccccaccgataactttcatgtaggttcaccagtgtgtttacggggcgtaagggcactctgcttctcgcccaaagttttcatcgtcatccgtttcccgaggccgagcttgtcctaacaccaagcgaaagccactgccagcccgcagcgacctgagacgaccggccaggtccaaccggtccttggcgggctttctgattggctgcggggcttctagccactctcctccccttggcttctggctttaatcgccttcggaaaaattagttccctggcggatgatttccagcctgacgtttaccagcatccctgttcaacccatcttcctattcatttcccctcctagccctctgccttacacacagctcatgccccctacccacccccctaccaccaaaacccgcataggctttttctgaagtcagttactttgggtgctaacaatctttttgtaatattttcgttctcatctctaattgagactcattcaacttttctactttccaggtactgtattctattaacaaagaccctctctttctctccttggtgtttccccgttaagatctttggaggctttgccgcaaactttctctggtgatgcccaaaaaaataaaacgctccggactcttgtggccgagttttaaaaatttaatatggagtcggctagagtacccttttgcggaaagaaaaaacaaagaaggcaaaaaaactttcgaagacctgtgttaagctatttatgagtattatctttttaatagtgctgctgctaaaattattttaactaggtagttaaatccttttatccttacaccattaaacaaagtttaacatgacctcccccatcccacccctcagaaaggtgatttactgcgttaaggagcaaatcaccaagaagtacacaatgatgaacactcgccttgtaatatgaggttgggggcagatctttcaaaataaaacatggagttggattttttaaaaggtgttggctaggagctgcttcctaagcaagcaatcaaagccttggtaaggaggaaccgtgagcgccccttaagctcaaatccggtctttctggttgtttgcacatctaaataaatctaacgatttccccaccactctgcaaacactgatgctccccgcccgcactcgggactcctctacctctctggctcccggtcaactcatcccgactctttagcccgcccgaggtttcctccccggagtgactccactgccctggtccctggggtcctcctggaccgttctggaagggcccccgccacagccacctgtacacaccccttggccttatcacatttatcgctcttcccctttcagccaacctattctccttcgtttctgtcacgacctgctcttctctttctaaatcccggctccgacatacccactcagaaggagtgacaggagggattggctgcggaggccacacgggggaaaggagaaaggaccctattgggaaagccgaggacgccggcgacgctggcccttgggcgctctggggcctacggaggccttaaaccccaaagattggcggggacgaagggccggggcactcgagcgagcctggagcgggcaaagactgcgttgcgactggggacaggtctcgcgcggttcccgaagggtgcgaagactgcgctgagcattttgaaggcctcccaaagcggctggaagacaccccgaagcggcctcccaaccagaatgatctgaaaatcccccaggctgggctcgggataaatactagttctgaactcccggcgccagcctaggccatttgttgtttcgggtttcggcctcattagtatgcgcctacgagggaaaatgagacttccccacaggttaataaacaacctgtccggcacaggttaacaggagcctctctcgccctctcctgccccacccccgccaccttttaaggaagcttttgccttcccggaggtttgccttctctttctgttccccgtagaaatcttacgattgtgtctgggttaatgttttataagggactggctactctcgtctacctgccgggctttcccgatctaatatcgaaggaacctccccaagtcctagtaaggggtcccccctccctaaagtctcgaagtggggtagagaccttctccctggagcccctcgcctcctgccttcggtgacgcgctctagcacacccaatttcagttggcgagggggtaagctgagatttcgtttctgcacttgacctaccgcagaaaattcgcaaatcctttgattgtctgtttaaaatgaggaggaaaccagctccctttgcggcgggattacagtgggaacaagatctaaagattctcttgcaattcggcgaggccgagggaacggggttttgcaaaagagaaaaggagctctgtgagggaggcgataactaaatcgggttttagacaaaaggattttcctcagctaaagtggccgaagacaaaggaaaacagaatctattttggaagatttccaagaaatgccacattaaccttagctgataaattttgcttctcccaggcccccctcttcccttaaagtctgctttatcatatttacataagtagcattagaagggatgtatctattatggatctaaagggctagctcacatttcctgtgaaactcaggcaagtttcactgtggctttaccctccgtgcttagttgagccatttccatttaaataccccctgacccaaggattacctcaatggactgactgcacgggttttgtaatttcctgaaaatgagatttcgatttataaaacaagaaaccaattagtaaccaaatgaggcgaagtagatccactaaaattgacctaatcccacaggcaccatttaggcccgttcttggcgaatgaatgatgagccccagtctagtgtgagctcaaagcatcatccagctgtgttattgcaggcagcaaaaataaattgatagagcttttccttcggaatgaatttaatacccttgacaaaatatatattacagacccgacatcatcaccgccctcactctgacaggaagaggaggaagataagcgtgtgttctgttcttttaaaatttttctttattttaataaataaacgctacatctcaatagaaatgtatcctccttgcagtccttcccgggaaccttcacctccccaactaattgaggtgccttgtaggcaatgggggagggtggcggaggccctgttccatgacctgactacgacttggtgactgaggaggggaaagccctcctaggccgaggccactgcggttcctgaacagcttgtctcaaccaactgtgtatcccttgagagagtgtaggagagtctggcccagggggtaatcctgaaaaccccaaatcccatgtatcctgccgggcctgcacatcctcgctaaatgtgtactgtgcaagtcttccccgggctgaggcgtcgagtggccttcgtgttcagcctccgggcgcctccgcagccgagctctttagagaaaaaaagagagggaaattggtgcaaccagcccgaatcaagctcctagagcagtcactggtaggaggtcccttcacgcaccaaggcgcacccgaccccacctctggcactgctgcccgccctgcctgcggccctctccggctaaggagcctgtgtggttgacctgagggcatcggcgagcgcgccgggccaggtcttgttccacgcagcagcctggaccccacagtgtgtgcctgcactcggcagtgccctgatctctcctgcctgctgatcccgggccagagacaccgcggccgcacccagggaatccactaatgttactgtaaatgtggggtggaggccgaaggtcacaccgctgtctgtctctctctttctctctctctctctctctctctctctctctctctctctctctctctctctctctctctctctctgccttcgcggagctccagccctcgagtttgggcttcccgtagggatagagcctgcgggccaacctggctgcccgagttggagccagccgcgaaaagacggcagaaacccaaggagggcggggttcggccagactaaaactgggggcgaaattcatgcagcgttcatgagacagtcctgcgtgacggccgaaaaacgtcaatcgatgtcgccctgggactccgggtcttcgaatgcggcccagctttggctatgccacctccctagaggcccgcgctggcgaggccgagcccgaacgcgcgggcgaatcccacttaggttctacttggcgcagggactcggacgatggcacctaacccgccttcccgggaactgcccaaacagactggatctggacctaaggtttagacgactgcttgcccttcagggacagtggccgggagggcaggaggggctgctggcacacacctgcacctgcgggacctctgatgagggcagggggcggctcctgggccggcctggggagtaaggagactctgtgctgaggccacgagctaggcccttggctggggccaccgcggacagaggatgggacacaccgcgcagacctggctgactgcgtgcttcgggcggtgcgggaggcgcgacggggacctcgacatgattgtcccctgtcggccctgcgccgccgaggccgagtgacaaggcgcaggaaccgcctattcggtggggctaccagcggaaggaagtttactctgcagtggacactgttttagcactttaagagtagcaggaccattcctaaataattgaggttccccctcctccacacaaaattttaaaatttcacggatcagacactggcaatgggtggcccattaaaatcattaggtgttagcaaggtacaagcctcattttcctgagaaatacctggcgggacggagaagtgcggtgagaatctatgggctctcattctgtgtccacatttgggtctgtaaaagctggaagctcccaagatttcttagaactggacaacaactcccctagaaattagatttgttctttagaaattcagccccgttttatcattagacgggtgattgcaccctgcttgaaagcatcccaccatagcttataatacctgtttttgttgttgtttgttgtttttattagtgatccctcccattaaagaaaaaagtattttttttattgatctgatctacaatttctagcatataaatccgccttgcaaatgctctgcacggagtttagttctgcactccacattttaagtcaacatcaaaactggaattaaacacagaaaactagcatggagggtaaactgtgcttaaaggcctttaaatgagaaaaacttctgtaagaaaataaacatggaaacctaatgctcaatcatttccccaagaagcaagaaaaacagccttaaatcaccgacccacgtgggacatggggcctctttttctttttcagttctctgcctcaaaaaaatataacaccattaagaatttcaatcttgaggtgaatattatagaaaccatctgtggaagtttgtttaatcacccttgtagagatgatctttcctgagtagttactaatttcaactctgtgattatttttatttttccaagacatcttgtcaatgaaatggcaatgtgatgttaccaagattctgaatagctatagatcagaaaatatatctgatcctttcaaagttgattatgaaagcctccacacccccagccaaaattgctttagagctggataacaaatatgtatgtctttctagttgaatttgtcctattttgcacacaaataaagtcatgctattttttagatcctgcccctctggctttgataataccaaagatttatacatttccatgtgcctcaattttttctttgcaaggctactttggaatagaatatgtcactaattggcagatatgaagtgttagtgatttctcagttatctttcctaattttcttttttctctgaaatctccaatctaatgctttattcttaattattccaggtacccatattccatttctctgttctcccactcccccattttcacctaaacagtttaatttcatctagtcaggcaaataaaagctgaaacttgcccccagacaaggaagctactagacttgggagaaaaaaaaaagtgtattcggcaaatgagaagggaaggaaattgcctgtatttaaggtgtatttaaggatatttcttctttcaaatataattatgaaatgattttgtttgttcatttaacttatagccttttggcattacagtgtgttagagatgaaatagtgtatgaacaaaactgaagttttacagcatttttatacctatagctatgtcaccagattaataattatttagattatataccttataaaatccatatattacctgtgataagacacttatacctatctttatttcatccttaaagctgtattgaggacctactatgtactagggtggcttcatgataaatgtaaagatgaatttcatcttccaacaaattccatttaacgccactagaaaagattacatccatataaagtgatcagtttccccaactgccttggaccccaatcttgtttgctctctgccttcagtcaacactgaacttaaatttggcaccccctataggttgtgcctggtcttgcgattgtgactattttattcctttgaaagctgttgttgttgttgttgttgttctttaatattttaaagagctgtgtttgattttgggtttttgaagcttgtccaccgtcaaaaattaaaaactcatccctaggagccagctgttctgatgaccctgtctagctcactgggtggaggctgagggtgagttatgagctcaacagtagctagagaaacaaatgatgtgcccagagttcacacatcgtccatcccctcctccccataaactcacactcacccacagaagggagagaaaggaggggtccggggctcgggggaaggtgagggggctgcagaaagcacagtcactgttaaagtagccagaggggaccgttctggccaccaagaggactccagcgggagccttcattggcgctctctttaaaaataacgagaggttggctgtaagagtttattttgttcctatttatttataacgagacttataatgtgtagagttagcacttaattatgcaaaaaggcttgctcttttaaaaacaaaaacaaaacaacagcagaaaacagcccgatttcctcccagctgcgcctgcccccgggtctacaccaagccgactagcttccctggccggccgactccccgggctctcccggccggctcggtgcccgccccagaacgccgccctgctattcttctcctcccgcgattactcgcagccccacaagcaacaccatatgctgcttctgatcaaacagcgagcgacatcggcaccaataattgacgagaccggctggaaatcacgcagaaagggagcccactgagaccgcaggggctgacaaatcactgctaataatcctgttaggaacagtgcggccagcggagttcgcaatagctttatttttataaagtaggcgctgacagtataaaagacaacgagatctcttttttaaatagaaggcagtgtggtataatggtaattatcccatcaacaattcatagcacagtttgaacgggaaatgtggtttttagtatataagttccccttctttttcttctttttttctttctttctttctttttttttttttttttttaattttcaggtactttaggctttcatttcttttttccccacagtttccagggtcagagaagaactgttcaaggaactgctttaggagggaacgactaaagcatcacttgtagtttgaaggtagaactgaactataatttgaaagttttcctttagcttggagcatgtttttcatgctccactaatttggagcatgttttgcaggctttttgacttagataataacttttatgtcatgatcaagcaaagtgaaactgcaaacccaataatgactgtttcctgctcatccattcatttaacggaaaaccacaaaccccaaacatctaaaatcaacaacaacaaaaacctccaggggtcaaatcagaagttctcatttgtaaataaacacaattctttcccttggatttttgtttgtttgcttgttcagtaatccctcttttacatttctgaatccccttcccccagcaaagacatatctaaaatatttttaaaaatctgtttgcattatttgaatccaagtaaaggaaaagatggacaaatagaaaagtgtccttttctagtaagtataaatggttgtatataggacagtgttctatgaaagctgctctgtcctcacacagtgaatcttgataatctaaatatgagttttaaatcatgtcaacagctcagctattctaacttctaggccttataagacaattttctcaggatctatttgccaacctgccacccagaagatattttctaagcgggctagccatcttaattcaatcttatgtattttaggactagcctattatcttacagataacatcaagcccacagttgcaaatcatcaagctccagagttagtttcagaatctgcgaatgtcttgaaaactcggaataaatttgcttagaatttatttaagaacttgagtaaattcaggcatacttgttcacaaatatgcatgttactcatttgcaaatctttagatatatagagaaattattatctggcctatctagctccaggtacatgggtctatccacacctggcaaaaaaaaaatacagaattaggcggtgctcctggtttttactggacaaaattctaacaagaggagtaaaaaagaaagtcatgtttggattagtagtactttcaattgagcctagtatctgaagtgttgacaaaaggactgttgggctgcttcccaaccaaacatatctgatggactgaagagaaagtattgatggggaggtagagggagcctcaaaaaagcgacagaaattctgagttcagtgaggaccttagtgaagcagccgagctaaacttccctttgcaaaatatatatgtaaatatgtatgcatttctctggtcactgatgtcggctcattgcctggcaaatccccggccccttctgcctttgaaattccatctgggcaaagtcacttaccttctgggaacaccactctcattttgagatagctggtcgtgagtctgattatggatgctttgtccagctgcgaggtgatagccgagggcaaaggcagtaatttagccagttcataaaattcactgttttccttctccctcctagtccgcgcagcatttttggacttttctttcattgtgtcttgttccccctttcttctcacaacttaagctccgcagattcatccaaaaccaaaaataaactttcaattagagatcatatttggcaaaaacataaaacatactttgaataaagaggctgaagtatttgcaccaagaacagtgtattgatggcagtaaaagaccagcgggggtgaacggaaaatatgttctttgaaaattcgggatgcagtataggaaagttgctgatccaccgaatttgggcgatccaccgaatttgggcaatcctgagggtcgttcagggtatcaaatgccagtgggacccctgaggagccagccttttcttctactgccagctgcgaaccctggtcctcggaaaatcgacataataatccctgacgtttgctcttcagtctcgcggcatttaaggtatctccgagcccctttgggaagagcaggaaccccagacaactctttcaaggccctgtgaagacaacagcatcagagcataagagatcagcggctccacaagtactcacacactcgtcccaattccaaaaacacggccggaaagggcctcagtgcgcctagccaggcgttttgggtttgtttttaaagaaacgggtaaatcggcagcgagacagccccctgcaaataatgctggcattccctcacccatgccagccgcatcctccagacccctgggaagttgcccaaacaacaaaatacatatttctgaagacccgcaagggatcttccgccgcggatccccgagtccgcgcccaggccgggcgcacgtcccaggaaagcaggtttccgcaaatcagaattcctccaaggcgaggcaggggcctttcagctccctaccttggcagatctggaccttggctacctctttaacttgggtctcaagtctgagggattcctcaaaaagtgacacttacacaccaagtctctcgggactcccaaggcgacccagcgctctggctgcccagcaggggctgcaacaagcggggcccagcagcgccaggttaacaggtggcgcgctcgcgacagcccctcgcaggctcccccgggggtgggaggcgccgcggcctctcccacaccaccgcggagctgcggggctgctgggcgggcgcggggcgtcttctgcttcacctaccttcagtccccacaagcggcagaggtttcgggggcgcccatctcttaactgttctcatgcctaccgtccaacccagcgacaccgccggcctctccgcttcccaccggcagagaggagcagagcattcccggctcccttttctggatcatgaattggaggaggggtgcgtggcagaaagaggaggatgcaagctttgggacgagtgaggtgattttagaatcctggtcctccgtagttgctacgaagccagttcactattattcctaattggaagccgaaaactgccccccgtaacttctttatagcttaagggtttagcttcaacttcactccggggccgcctctctcccgccctccctcaatgccactcacaagccccctcgcctcccattggcctggcgcggccaggggcgaggcgctcattggccaatagggctgagtgacacgagtcggccccgagccgccctccgcgcgcccaggctccgggctctgaatcttactacccgcgggaccgctggactcctaatgagctcagggtgccgggtcggcgctgtccggttgccgccgctgctcgcggcctcctgggccttcccgacgtcgtgcgcgacccgcgctcctcgagctccctggggtcgggtggttgagcgctcagtccagcgcggcggcccagcagaaccgggaacgtccggaggcagcggaggtcgggcctgcgggttaggtctaccggcggaggaggcagggttcgcccaaaggcccatcccgctggcagtcgctggccgacggcgtgcgcgaggccggtttggggagttattttctctttctcgtttctctgaaaccatggcgacacggaattcattgccagaggaaataaatacaataactgtctttaaattaatcccaaagaagtgcgtctttttcgaaatggcttgggtttggggctgatttttttcaccgtggaaactcggccggggagttttcctatggggagcagctagggggacactaggggaaaagcttacatttcagggcaaaatagaatgattgatatagagatacatagctcccaacagtcctttatcttaaacattagccaactctttgtcgggttttgtttcaggaaacaaaagtccaacatgattattccttacagaaaggatacagtctacatgaatgaacttaacgatgctcgcggttccctaataggagctgtttaaacaaacgctcaccaggactcttgctgactaattatcttttagagaccctctaatttgaaccgccttctctttctctcatctgagaaaacacaacaggtagcatcaagaaaaagtcaaattgtcccaaaaacaattgttgtcctcacgaatcaccccctacagactcgactcccggcttggttttggtacgccggtgaccagattcggctcctagaggtgcgtttggagggagttgtttcatctaccataaaaatcagtgagaacaccagtgacggggcactcatcctctcgtttgtggcgctaattgccactgagaaaataaatactttgaagaggggtgtgtgccattctgctgatattcagaacaactttaagagtgtttgttcaaaaatacagacatctgccacctccttgccgcccgatggcagtaagatagtcgtagaaggacaacagcagctttctggtgttatttacatatctgggcaacacctggctggaggaggtgaaagttttggatagaaagaaaaagaaagaagcacggagattttgtaggtctttcaaaactggaatccagctaatggactctaatctaggaggagtca

SEQ ID NO: 547 - DNA, 53519 bp, Homo sapiens
  source 1..53519: mol_type = genomic DNA
accctgaaggagagtccagaatgcccagtggccgcgtctgcaacggagtcttctttctccaattgccttctgccccatcaccatgggccccacctgcgccacctgcgcccaccctgtgaccctggctcagcgaccttggcccttaatcgcccaacgccgattcctcaaaattccggctgcgctgaatcgggctgcttttgccgccgccccggcagttgggccctgtttccgccggcgccctgggagaggcctcaccactcggctgggctccctggcccctcccttcccctggcctgagcgcccctgcggcctcccgctcctcctgagaaggcgacaatctctttgcaccttagtgtttcgaggacagaaagggcagaagggtcacttcggagccactcgcgccgttttcacgtgtgtgtgtaatggggggaggggggctcccggctttccccttttcagctcttggacctgcaacaccgggagggcgaggacgcgggaccagcgcaccctcggaaggctcgatcctccccggcagggcgcctggccaacgagtcgcgccgcctcctctcggccgcgcctgctggtgaccttcccgagagccacaggggcggcctcggcacccctccttccctcgccctccctgccgcccatcctagctccggggtccggcgaccggcgctcaggagcgggtccccgcggcgcgccgtgtgcactcaccgcgacttccccgaacccgggagcgcgcgggtctctcccgggagagtccctggaggcagcgacgcggaggcgcgcctgtgactccagggccgcggcggggtcggaggcaagattcgccgcccccgcccccgccgcggtccctcccccctcccgctcccccctccgggacccaggcggccagtgctccgcccgaaggcgggtctgccataaacaaacgcggctcggccgcacgtggacagcggaggtgctgcgcctagccacacatcgcgggctccggcgctgcgtctccaggcacagggagccgccaggaagggcaggagagcgcgcccgggccagggcccggccccagccgcctgcgactcgctcccctccgctgggctcccgctccatggctccgcggccaccgccgcccctgtcgccctccggtccggaggggccttgccgcagccggttcgagcactcgacgaaggagtaagcagcgcctccgcctccgcgccggccgcccccaccccccaggaaggccgaggcaggagaggcaggagggaggaaacaggagcgagcaggaacggggctccggttgctgcaggacggtccagcccggaggaggctgcgctccgggcagcggcgggcggcgccgccgggttgctcggagctcaggcccggcggctgcggggaggcgtctcggaaccccgggaggccccccgcacctgcccgcggcccactccgcggactcacctggctcccggctcccccttccccatccccgccgccgcagcccgagcggggctccgcgggcctggagcacggccgggtctaatatgcccggagccgaggcgcgatgaaggagaagtccaagaatgcggccaagaccaggagggagaaggaaaatggcgagttttacgagcttgccaagctgctcccgctgccgtcggccatcacttcgcagctggacaaagcgtccatcatccgcctcaccacgagctacctgaagatgcgcgccgtcttccccgaaggtgaggcctcaggtgggcggccggggacgctggggagcccggcggccccggcccaggcgggaagcgcaagccagcccgcccagaggggttgccgcggcctggcgtccagagctggggcgtctgagggaggttgcgtgagggtcttcggcttcggcgctggcttggggcgaggggccagggccttggcggcccaggcgaccaaaccctctcctggtccagggctgggtgagggcgaattacgaattgttccaggggcaggcagtcccccagcccgcacggccagcgagttctttctggttttgttctttctccctttcctccttccttccttcgccagtgcattctggtttggtttggatttttttctctctttctttcctttctttctttctttctctttctttttctttctttcttcctctttctttcattctccccttccttccttccttggccccctctctccctccctccttccttccttcctttgccaatgcattggtttgttttctttccttttctgctttccttcctttctttggaagttcactctggttttgctttctttctttccccatcccttcctttctttatccctccttcccttcctccttttctttctacgattccctttatttttccttcattcctccctctttttgtctcttctggaggaggtgaaggagggtcagcttcaggcgctgcgagtcagcggggatcacggtgaggcccaagcactgcaggctgaggccacagagcgaacacttgtgctgagccgggccctctcgtgaggctggggtgcgggaagtccgggcaggagagacccgcccccgccgttgctgagctgagacccggctgaaagagaggggtccgattaattcgaaaatggcagacagagctgagcgctgccgttcttttcaggattgaaaatgtgccagtgggccaggggcgctgggacccgcggtgcggaagactcggaacaggaagaaatagtggcgcgctgggtgggctgccccgccgcccacgccggttgccgctggtgacagtggctgcccggccaggcacctccgagcagcaggtctgagcgtttttggcgtcccaagcgttccgggccgcgtcttccagagcctctgctcccagcggggtcgctgcggcctggcccgaaggatttgactctttgctgggaggcgcgctgctcagggttctggtgggtcctctgggcccaggagctgggagggctgcgccggcctctggagccccgggagccagtgccgaggtagggagacaacttccgccgcagggcgccggacggtcggggcagagcaggcgacaggtgtccctaggccgcagggcgcttccatagcgccatccccaccaggcactctactcgaaatcggaaagctcgaccttttgcgttcgcctctgccaagcctgttatttgtgctggccgctgggtctggagctgcgcttctcggcccctccccggtggagcgcagagggctggtctgcaagcgcggcctccagccccgcggctccccggcccaggagccaggcgcgggctgacccgggagcacccggcagcggagggggctggaagcggaccctaggcctctcctgtgccacccggccctaccgcgcggccgcggggcgctctcctctcgggcgcagcggtccttcagcccagggcaggttcctccctttcctactcggaacgtggcaaagataccccagtcccagcccctccagctgagagctgttgcccaaggtcgtcgctacttgtccgctcaatggtgaccccttggcagagaactagggatgattccactccggttgatgttttaggggaaattaaaagaacattcggttttctgagtctccttccggggaggcgtggtggtaactggtttgctgggaagagccgttccttaaccgcatgcaacaaagcaggtgtggaatccggacgagagggcactcactgccttctgccccctttggaaatagaaaaagccttcgaagcagcaatccaaagatcaaatgatttgcggtcaatgatttcaattaaaccagaaattagtaagggagggccgagaagacacggctgctcagaagctgttcgctgtttgagggatttcccggagagcctgttaaaagatgcgaagtggtgggtgtaccgctcagccacctttaaaccggctctgtgcgttctggctctggaaagcaagtctccaggcatttgggctcagaattgctgggccccgagtttgggcgggggtggtccttctgggggtcaggccttgagcagcttgcactggtggcaggtttgggagcagttgaggggcttcctgtgtgtcttttggagggggtgaccctggaagttggcactctggaagggagctgtttggccctagagttttggaaagggccctgaacctgttcggtccccctcggaaagggaagggagcagtggcttagtccctccctcctccattcgtgcaatgcctggggtaggggtagacctggagccggtggactcatatccttggaattcgtcaggacagctgctccggggccttggccctcagtcagtctggggctgaggagtagggaagctgggaacttggggcagaggaagaagatgcgtttagaaagacctccattatgcaaactggagtccatttatgcaaactggtcacccttccagtagctccaaagagtggcagtggagtggcatcttgattgatttaacctcttctcaggggacctgggtctgcgagggaggatatggctgcggggttggaataggatctgtctgagctgccagggtcagggtggtggccctagggaggttttagggccagggtggtcccgggctgtggcaggggctctcagatcgcctcgggctctcagctgcaaggtgaaaaataccatgaggaattgatctgccaagggcggtcttgtctcaaagcaagtggattgctggggtaaagaatctagagaccagcttaggactctgggaggaagaaaaaaaaaaaaagaatagcatagtcctaaggaactgcaaggatcaccagattaacccttcatacctggggaaattaaggccagacatgacacaggcctttcccaaggctctgtagcaagggcaatagcaggccagttgctgccactgcggtcctgtggggcatgttctcactccactgcacccaggaggctgccagcctctgttccttttaacatagatctcctcagttgttaagacagaaagaggaactcagaggggtccctgtgtgcaaggcagagggagaccaccagaaccagggtaagcaccccacttggtagccagttcaaggacttggggatgttttcaacatttacagcgaggtttgaggccccattgtcatgcagcgctactcggccttggtctccttatctgtaaaatgggcccattagcaatgcacagggttgctgtgatgaagggtgaggtcccacaagcaaaagctgtgcagtgaggggggaatcctaagcattgttcctatgccattcaccccttcctgtgagctccccatattccctggctcaaaggagtcttgaatggcagggatggaggactcactgcctggactttgaagacccctgctttctgggtgaccaccttttcttccctttgacagtgaactaatacattggaggtagatagtgctgggaagaggacaggagaccacggctgactttggacatgggctcgaaattgataacttgatgagtcttggagggtggttaagataagctcggggctggggcagcgctgaggtctgatggtcagccagccctccccaaagtgtggccctccgttctggagataggggctttggaaactgcaaaagcgtcctggcaggccagctctggttgctccctggccatagctgctctgactacaggcagcaggacgcaggtcggcctctgcccatcggaggtcagaggcagggcctccagcaccagactcagcagtgccactgcaaacctggcacaacaggctggtcccaggactcagctcagcagtgaagttggaaaccaaggttgagtctccccatctccctttccccaacccgaaagacccaagatgggtgtgggtgaaagagggagaaagaattgctactccagaaactgtcatttgcccacacgaaacgaggtggggttcaaggtctgaactcttccagtgcctgggtgcctttgggtttaaattcagctgcaggtgcccccatcaccacttccacctgagcacaccacgagaagccaggttatcttagaaactgtttcccggaatcaaagcgacttgatttggagagttgggtgaggagaaactcacccctatacccctcagggcgtcagagatgtgaggcaattctctacctccgctggaaaaaatgcagatttattaaaggtcgactgtttagcagaacaacgtagattttttacaacgctttccccgtctctgctttgaagcctgccaggctgcagctggggatccaggagggaaagcccgcaggcgcagaggggacaatccgggaagtggtaaaggggacacccgggcacagggcctgtgctttcgttgcaggcgaggaagtggagcgcgcgctgcagattcagcgcggggctagaggaggggacctggatccctgaaccccggggcggaaagggagcctccgggcggctgtgggtgccgcgctcctcggagccagcagctgctggggcggcgtccgaactccccaggtctgcgcacggcaatgggggcaccgggccttctgtctgtcctcagaatacgtaggatacccgcgggcgacaagccgggccaggctaggagcctccttccctgcccctccccatcggccgcgggaggctttcttggggcgtccccacgaccacccccttctcacccggtccccagtttggaaaaaggcgcaagaagcgggcttttcagggaccccggggagaacacgagggctccgacgcgggagaaggattgaagcgtgcagaggcgccccaaattgcgacaatttactgggatccttttgtggggaaaggaggcttagaggctcaagctataggctgtcctagagcaactaggcgagaacctggccccaaactccctccttacgccctggcacaggttcccggcgactggtgttcccaagggagccccctgagcctaccgcccttgcagggggtcgtgctgcggcttctgggtcataaacgccgaggtcgggggtggcggagctgtagaggctgcccgcgcagaaagctccaggatcccaatatgtgcttgcgtggagcagggagcggaagaggcagccggtcctcaccctcctctcccgccacgcacatatccttcttgacttcgaagtggtttgcaatccgaaagtgagaccttgagtcctcagatggccggcaacgcgccgaggtcacgctccccagaaacacccctctcccctcccctaccccagctccccctggggcgggtggtaattgggggaggagaggccgcaggcagggaaggggtgggaaagccagagagggaggcacaaagtgatggcagcccggcaaacactggggcttcgggctgggccgcgctcgtttaatcccacaaaaatcccattttggaggtgagaaatagaggttagaggtcgggcccttctggagatcagaccgaggagacgggcccagctggcgtcttaaagcaaggagggggagtcgggaggaggtgagacccctgcacccaggtggggctcccaaaccgttctggatttaccacactcccaggtccgattttccatggagggctggggttagggactggcaccttcttgttgttaaccgcatttgatattcacaagaaccctgtgaggagactttgtcaccgtttttagatgcctgaggttgccggaggggcagtgagagaatcgtctaacctggtgttcctaccacagtccaggccctgtgtcctgggctggacccacagcccctgccaccacccagaggaaggcgcgaagctggctgcctcctttacgggtctcccttaggtgccctcatgaagggggacggccacctcacagtgcaggaactatctccccgtttgctcccaaatagtcttcttggtgtggtgctgtctatggtctgtgacctgcatctggagttacccccaggaccagcttcggaagaggagggatcgcttggaggccgtgcagtgtgaggaacggcaggcagggtgtgggaccaacatgcacacactcgcaggtgctggggccagggaggaatgaggcgctggctccctttccctccatttctccctgggggtcccagcaacctggccatccctgacttccaacagcacagcgtccccacaggtcctgcagtgctctgcaggggtgcagggagctcccctccccccagccgcaacctcaccttcctcacccccacccctccggcaggaaaccacaggctgggttggggacccctggtgctccaagagagcagtgagtgctgggagccgctaaccccgaggcgcctagcacagactcttctcaccccttatttctgaaataaagcccttccttaggtccagatgaggaccacgtgctcagtgcctcactttcgtgggagtgtatatcactttacagtatcaagacaattttctttcgttacaaatctttatttagtctctgcgtttagaccaaagtagatttttatgggctgagtgaaaaaacctcgcccgcattggtttctgatggaacagctggcagcgccacggccccgggtggggtggcctagaggcaggggtgcttgggaggaacatctagcacccgaccacctccaccaggtgggaaagggacgtttgcaccaaatctccgccggcaaagcagaggctttggggaattacagaaaaactataatgatctaaaagagaacaagttatcttgaactgtgcgggtatttgaatcatacagaaaattgtcctgtgtgcccaatgcacttttgcatgtagagccagggccttcgaggaagctttcaggagatcccgggcagcggagtctggtctggagtttcatttccgtaggtgcagatttctccccaagtcttcccgccatgggctttgcaagaagccagggcccagaggccacgctcaccgttaacactgcacagggcaaaggtggctccaggacaactgcccaaccccaggaacgacccagcagcagagaaaaggacagctgccagggtgcctttgtcgctttttggaaatcagaattcctgggtccttagttaagtcttacttcaccaaatcccaggaccttcacattttggttcttgccattgctaacagttgtaaatgctgccgccacgaggcctgggaggaaggacccgctggtgagagcacagggagtgctgctgtgatcacggtggtgatgcggggtgagcgcgatttcccgggattaaaaagccaccgctgcccccgtggtggaggctgggggcccccgaataatgagctgtgattgtattcccgggatcgtgtatgtggaaattagccacctcctcagccaggataagcccctaattccttgagcccaggaggagaaattaaaggtcatccctttttaaattgaggaatagtggttttttttaacttttttttttttaggtttttagttgccgaatagggaagggtttgcgaagccgctgccctgggccgaggtgcattttacgcttccagaggtcgaggcctccagagaccgcgatgcccagggcgttcccggggaggctgagagacccagggtgctctgggtgactgcacggcgactcctcgggaacccactcgtggctgcccgcttggaagggctttgcggccccgggaacgatctccaggatctccacggctggtcaggttccccgtccctcgtatcccgcgctgcccgggggctcctgcctttggttcagtgctcgcggcaccaccgcactcaggacggcagtggggggctggggctggggctgggcctggcccagcgtgggttggggcgggggacgcgccagcagcgcccgcagctcgctccgcaggggtcgcagccaggggtcgggagctaggctcgtgggccgggagacgccgggcgcgttgtcctccggggaggttggggtgcaggcggtgcaccgaccctcgccatctggcgctgcagccaccagccacggcgcttagtggagggtctgcggccaggctcccggcggaaagattccggggagggctcgggggttgtcccagcccgcgctaagcgccgcagcctcgcccggctttcctgcttcctcggactgtgcaggggaagcctggggtctcgcggggcgcagcagtcaggtcgagggtgcagcaggaggggagtcctgacgggcaggtccctctttcccctggtgcgcaacactggttggtagcttttgcggaggtggtgaagaagggcaggaggcctgttgagcggaggagtccggggatccctaattatgtgacaggagaccctttccagttcggcctgtggcccatccctctctcaccgccggcagattggagtctgctctcggggagcccccaggtaaacccctcacagggagaaggtttcggattggaaggaggaccgcgctcgtggggcgcctgtgagagctgggaagcccaaggggtagcgtgtagggggttttttatgcgggaggagctgcctcctgggcggcggggactttctgtctcagcctgtctgcctttgggaaaacaaggagttgccggagaagcagggaaagaaaggagggagggaaggagggtccttgggggaatatttgcgggtcaaatcgatatccccgtttggccacgagaatggcgatttcaaagcagattagattactttgtggcatttcaaataaaacggcaatttcagggccatgagcacgtgggcgacccgcgggagctgtgggcctggcaggctcgcacaggcgcccgggctgccggccgctgcggggatttctcccccagccttttctttttaacagagggcaaaggggcgacggcgagagcacagatggcggctgcggagccggggaggcggcggggagacgcgcgggactcgtggggagggctggcagggtgcaggggttccgcgtgacctgcccggctcccaggcatcgggctgggcgctgcagtttaccgatttgctttcgtccctcgtccaggtttaggagacgcgtggggacagccgagccgcgccgggcccctggacggcgtcgccaaggagctgggatcgcacttgctgcaggtagagcggcctcgccgggggaggagcgcagccgccgcaggctcccttcccaccccgccaccccagcctccaggcgtcccttccccaggagcgccaggcagatccagaggctgccgggggctggggatggggtggtccccactgcggagggatggacgcttagcatgtcggatgcggcctgcggccaaccctaccctaaccctacgtctgcccccacaccccgccgaaggccccaggactccccaggccacctgagacctacgccaggggcgcctcccgagcgtggtcaagtgctttccaatctcacttccctcagcaggttccacccagcgcttgctctgtgccaggcgccagggctggagcagcagaaatgattgggctgctctgagctctgaagcattcggccgctgtgtgtgtgcaaggggcgcaaggacggagagacagcatcaataatacaatattaacaggagcacttgtccagagcttactgcaagccacattcagttccggaccttattgacttccccctcccatctagagtggattctggtttttcaatttgttttgttttgttttttgtttgtttgtttgtttttgagacggagtctcactctgtggcccaggctagagtgcaatggcgcgatctcggctcactccaacctccgcctcccgggttcaagcgattctcccgcttcagcctcccgagtagccaggattgcaggcacccgccatcatgcctggctaatttttgtagagacagggtttcacccaggctggtctcgatctcctgacctccgatgatccgcccacctcagccttccaaagtgttgggattacaggcgtgagccaacgcgtcctgccttgattctgtttttaactccattttttagaggaggaaattgaggcacagagaggttaaataacatgtctaaggtcacacagcaaggggtggagcggagttagcccactggcctagctctagagcccacccggataaccagaacttggtgaggcctccgggctcttgcttggtttggagccaggtgcttagcgccccgagcccggggccattcaccctgcaggagctgcacgcgcccctgacctcggcttttccctggcagcagaggggctttgcgggtcggccgggtagccctgagcacagctcgccacttccaggtgggctgttggcgctggctggggacacatcccgatctttcaaatgccctttacagagcctcatcaacgacccgattcattcccccctcctgtcatttgtctctgccatcgaaaaatgcctaccgagagctgctctgcatttccgccctctattttgtgttttactttaaaataataataaaaaaaatgttggctgcaggacgccatgacttaggtcagcgagtcagccgctagctctgcatttccaaaaagcagatcttttcacaactctcttgccccaagtgccctggtgtggtttattttttaaaatgcatgcctgcggaagagaagacccggggaatattcgaaaccccgagcttttacaacataaagcgcatggtgtggccgcggcgagtaatggcgctctgggagccctgcccaggcggcctctgctcgccctcctccacttccagctccgagctgggtgtgttgcaagtttcatactcctacatattataagtgacactaatatcagggacaactaagtgctggggaacttcaatgaaaacctggctggtaaagtcaacacccccagacttctctgtgctacatttctttaattaattccggagtggtgtgtggacgggcgtctttgcagttattatacacgtaagtgaattaggccatttgaagctacgaagtcatacccaacattttccattaagaatattatttttttagctactgctggcaacttttagaatttaattatgataattttcctcttttcctcattatcccagatatggctggttgtgagatactttttcactaaatgtgtctctttaatgattttggaattaagcaagcatgccaaatgcgccaagacatttataactttagaaattgctgtatagtatatatttttggaacaccacaggtttagttgggaaaatattttgcagctgagttagaaacttgaaagttaggcttataatcaagatgctgattttcaaccttagcatcggggaaggtaatgatagtttagttggcaaagactttttgcagcaaactgtatttgagacagcagaatccaaggatatctttcaagattcacttatactacattctttttagccccctctctaggggtggagggggtggcttagaaaaaccaaaggtaatctggtttcaattacatgctgtaaaaatagaatttgtggccagaaattaatttggaatattttttatgggggcaacattgtgggttgtatgagtctttcaccaactttattgcttttctttggttctggatctaaaatatgaatgagtaaataaaatacagtttcctttttcaaaaataatttagtctttttatccttgacacataaatataatcattacctttttatttgtcttaattacctcttatagttttactttatttttgagggttagccaacttaggaaaaatcagaatttcatttgggtagttttcatttttcagaagttgatacttttcctccttgaattttgcaaaggttatttgatctcttgcaaattctaaataattaattctgtagacatagtctggtaaaataaccaggtattttgttttattttctgggcagtggtagtgttcggaatttattattccaacggtacttagaggtaactagaaaattgtggcaaataaagcatatgtcctagtggtataaatgactgccaattatgacataaaatggtctatatagtggtagattttcccctaagtaccatagaactccggatttgtactaagtgctaaaataaccccaaacaataaagctactacgtttaacctgagcttgataggaattctcaaatgttttgcatgatttttgtgatgtggatgtatgattgtttctaaagtgctttaaaagcatttcagagcctggcctgggaactaaaccctgggtgctgtttcctacagtcctttttaagaccctgggcttcatttttgcatttagcaagtatgtgttgatggtcatatttgatgcatccctccatcccagtgactgtaccattgttagatttaactctaatgtagaatgatcatctcttattctgacactttatcttttacagactttggatggatttgtttttgtggtagcatctgatggcaaaatcatgtatatatccgagaccgcttctgtccatttaggcttatcccaggtgggtattgcctaattttatgtgcaaccaaaatattaaacgaagtgacagcagattttgacagcctcacccaacttgaaaatgagtctgtttaagtgtttgcttttgtgtaagaacataaccctaaattgcaaaatcctcttctcaggacatcctgcaggggttttcttctccatattacgttttacttttttactttctttttcccttggggtttcatgaccagtgtgtcttcaccccgtcagccttgttccgagattctgccaaaacccggactatctgcttatgtagtaatgctagatgccctgaaaagagctccacaaagggacatgtttcagtccacacttgctggtctgcacgttacggtattatgagttgctataaagcaagaggtaagctgatgtggaacatggattttatgcagaatgttctttggggagagagaatggggaggggtagatttatgagtgttcgcatggaattcggggtcatttttcctgactttttccagttcagtggtcgtttcagcaaagcattttatatgcttgtgatagaaactcataaaactcagtttactactgttttgaacagcaaggtttctttagaacatctgaatattaccaatttttctggaaagatggaatcatcttcttaaaaaagtccaccgtttccttagaggaaagagggggactcagctttgtctctccctggcaagccaagggtttgatgggggatttgggggctccctgggcccattgaatgtctgaaaggggatagtgtaactgatcattctcattcacatgcctgacttaacaaatgtggatcatgattttaaaagtcacattttaaactacatatagggactaaatatttcttcacattgtgtactatcagagtgatttttcaccgtgactgaagacacactagaattaatgatagatacagaggatgggttccagagaggcccatattgaatttgaattacacctgcctcctaatgtagttaagccaaaataaaacatgccgattaatgtggcttcagtttgctcattgaaaaacaaaatgaccacatttggcaaactgcatctggtgtattccttttatttttctgccaatacttttttttataagcttgctatttatttacatccttctcttctgatgtatggatatccttatccagatccacatgggtttatgtaactctgtgtttctcaggcaaaaccctttaaaatgaattacatattaaaatgatatggaagtttttctcttcctcttctctgcttttatcaaaccaagtctcccaaatacagtttactaaggcttggcacttgtgcctatgtgactcgtgggattagtgtacttgtagaatgggaactactgttgggaacaggaaatttactattttccataattattaggttgatgcaaaagtaaatgcggtctttccattacttttaatggcaatgaccgcaattacctttgcaccaacctactattattattctctgaatttttatcttgccctatttagaatcatgcagggcccttaagttgtacccagactagtttctacttctgacttggcccaattacttaccttttttagtcatttagaaaacctttcatagtcttacagtaatgtcacaaacacaacaaaacatttcacacacttttaaagatgactgatcaaaaatcttttaaaataggtaaagtcactgttatcaaatattaaatttagatctgagctccctagcagtcaaagcaaaaagggaaatgtattcagttatagagtttttattgtctgatagggcaggttctttaacctacttgaaccatgtaacttaaatagtaaaatcatgcctgctctatctgtctttaaggatcgtggtgagaaagggatcaaaatgcctatttcatgtgatttacaaactacagggggcaacacaaaatccaggcatacccacagtttcatttgagcaaacttgctttcagtagagtcctttgggggctcctattagggctgcttggtcatttggaatgtcctggcccatcaggaggtactgtgcacatcccaagagatccggtgcattcagtcaggccgtccaagttagcctctctgtgttatttttctctttttatgtggaaaatagaattgattgattataaacacaataattaagaaggaccaaaatattggataggtgacaaatctgcctccggttcgtgatcggctccacggaaggaaatccaggcagcctcacaagttgaagtactctatttcctcatgatcataatgcagcaggaaaactttgcatcataattttgagagaggagaggggttaggcactaccattttctaagtaaagttgtagagatacatacattgtctctttctctccagtagaagtgatagtttctaaaaagataagtcaaactgatcatttgcatagagcaactgattttttctgatttctctgcggggctgtgttagcatcagttcacagctacaaaaacactttagtgccaagtgccctctttgtcggtgtctagggagcgttccacggtgaactgtttaaataagcaacaacttttctctcaaatcttccccctgttcatgattaactccatagaaggaaatctaggcagaatcacaatgtgtatttttttctgtcttctttacttaaatagtaaaataaagtattgaataggatgtcaaatacccaactggtcttttaaacatttttgcaccttttagattattttttaaaagtcaggcaaatgtatcaagcatgagacctttattaaaatgggcttaaacattttttttaagtcatgagagataaaagtgttaataaaattttacccagtagtcagagtaaccttttaaaaagaatttctgatgaataacgatagtagtaatagctgatacatgctgctcttttgtgttccaaaaactttcaattaccttcaatgacattatcttattaagtaaagatgtctttcatgttgattcagtgttaaactttatgttaaaagatcatagagaatgtaagcccctagatctgctataattgtgtggaaattcactacaaagtgattttttgttttgttttgtttttggtctaacctctactaaatgactatccaaattctttatttgagggtatggaaatgattctttatgggttataagcccatccccattccaagtcttttattaagccttatttgaacaagtgttgaaataaatctgcttcgtatggcagagctaaaattttagttttttttttgtttacactagtaaacaagtgattgttgctgccaaactttggtactaaaacaatgacagagacaaccataaaatgccagttgtctcctcagcccagggtccaagtgttaggcagtagagaggcaggctttcagcctgaaaactcccgttggtgggcacactcgcacacgtgtccacacacaaagcatctagacaagtttctatctacgtggatgaggtagagttggggcagcaatgtttttccatgcgtgtttactaaatgatttagttccatgtgctgttttggttaatgcaattattttacttttatttagggaggaggaagaaaaatccccgtgtaaaaatgtagctgctgtatacatttttaagtatccttgggttaagtttcctcaccaacatttcacacagttatatagcatctaggtaactagtatacatgttcaaataaatatacgtatgtaagaaatagctatttatgagacacataaaagaatgtcttatttgagattgtggccagaaacaaccataaacatatcgatgatgttgtttggaggtacaagacctaatcctttcacttttgaaataaagacaaaagacaacataattatgtttgttgacataacttgaaccctgaaacccaaaccatcttgttttaaaatccttaatttaccatactcagcaaaacaccccagagtaacgtgcattttcagagtgccaaacaactctccccttccacacagaatatatgcatttagtgctgtatttatcatgtgtaggtttcttggcaagaagaaaagctattcagcaaaacataaaaaagctcttagtaggaaagctatccattttgtagttagcagggttttgcaaatactaaaatatcacatggaaggtctgttttaataaggctgatgcatgagacccagggagttttatagcgacaaccataattttttttttttttgtgaggtagtcacatttctctcagtgttcaaaagcgtggatagatacgtaaatacaggaaacaccatgtcaaccataattttgacttaaggtcaggactgttttatcattccaaaatttgttctgtaaagacatttccgttatttgaaggctgtttcacttcctagacagctctggagttttcccgttcgttttgtcacagactcgagccttcagaaaaccaagcctttcatctgtgcaacctcacccttctcattcttcaaaagcatgtgttgagaacgggaactctgaaaacataagaacctactctgggattaaaacgcaaatctaacccttaataagcacagatggaaggtctttctgcaaggaggtaaagttgtttcccgaaaacacatcagttacttttttccagaaaagaacttcgagcaaaccagaattattctttttccctgaaaacatggggaagggagaaacgataggccaatataacatttctctattttgttattttttcatttttaaaataaactgttgaaattgtgagtcactatatattttcttttctttctttcttttctttttttttttttttgagacagagtcttgctctgtcgcccaggctggagtgcagtggtgcgatgtcggcttactgcaaactgcgcctcccgggttcagacgattctcctgcctcggcttcccttgtagctgggatcacagccgcatgccaccacgcccggctaatttttgtatttttagtatgacatgatttcaccacgttggccaggctggtcttgaactcctgacctcaggtgatccgcctgcctcggcctaccaaagtgtcaatatatattttcttaagccaactctcttagtttttagcttctgccactccgcacctggacaggccttcccagggcatagtcattgccaccctgaggaaaaaaggaaatggtcctgtcccaaatggctggcttacctgttgccagtttatttaaactttttaaggattaacaggaatgactcgaaagaagaatatttagttttattatttttcttaaatgaaatcctgtaataaacttttcagggaggcgaatgtccgtctgggagatctgttgagaaagtgccaggcttgggaagtgggtgttaagtagagggtagggaggattcctctaataggattctctctgttgctctgtttgcataatattggaaggaaacattccatgaataatgtaaaacatagaactgtgagagccgttttagggacaagatgacttagcaggccagaagtgtaacttattctgaataagaaagcaactcgctcttcttaacaaattggaagaactggctcagaggagtgcgataaatcacttcacccctccacgaccccttggtcccaagtaaaagctgatggcctagatgctaatctggaactgcaactcccagaacttctccattaagcagctggctgggttgtcctgttgcgtgaggtggcaccgtcaggatggccactttgcagataatcatgttgtctctcctctgatggagagccacaggctcccagcgacacctgcagcaagacacacctaaaaataacaagggggtggctcgggacaagacacaccatgagcctccttttgttatcttgagttaccctctctccttccggcagggtcaagaaggaattctccagacctacccaagatccttcgccacccaaggacggtttcccacatgctttgagtttcttctcaggctgggcactgggactccccttggtggtggaggaagtcctaccactgcccctgggcctcccctgaacaatgctggggttcaccgactcactgtccttgtctgccaccctcagcactattgattatagctctaaaaataggatccacccaccactgctcagaaggctgctctgctagtcatttctagaacattctgtgccactgtccatcttaaggtgggtgggggcccaggtgttgagactctatcatatcctctcctggtgcttatgtttgagagaacattcgaaagattctcaagttcgggaatttgggcctccagggacctctgtgtaaaaattgtaactatgatgggtattttcctggggccatccattcctgcaaagtgacatggatgtgctgtcctctgtgggctgtgtctggaaataggtagcgtcggactgttgaggcagcaaccccaggacataatccccatataacgtggctctctggagcaggcccagaccctcccgcagggcacgcacagccccagccacacccctgggcgggagccacagaattagcacagtcatctcggactgggagggccagagactcattgctggtaatgtgagagaggcctggcagcgcctgaggggcacagctcagagtcgacgaagaaagggcctttgtctgagttcatgtcctcctcgggcgcagtggcgcccctgccgtggacggctggtcggcctcggagtggacaacacttccacagggagcactatgtggacaggacagctggccttctggccacccagtcccctcagatcgccagcaagggaaggacagagaccctggcctgggtctgtttcaagccctcttctgtatgaaggatgctgcccaggccagcagcgccgcccacctctggtgcccaccttttccaccctttgctttctggtccttcctgctaagggttctcttggctgcaagctcaagcctcagtgccatggcctttttagacagtgtgggagacagttcagagctctgagctctgttgagaaaagaaaactgtttctgcgtttggcaaaggtgtgggttgtcagcagagatcaaagttctgttcctggcagggtgagcacctgtgacacaccttgcccctccccctgcgccaatcccagagaggcggtggcatttctgacccttcccttccacggcaggtggagctcacgggcaacagtatttatgaatacatccatccttctgaccacgatgagatgaccgctgtcctcacggcccaccagccgctgcaccaccacctgctccaaggtattccatccagagggaaaaaaaaaaacagactaaaagcaaggcgacattcttaaatggaactcagggctttgcttcccacatctgccaagtggctgggcatgactaggactgcccagcccaggtctctccaatacacacacagcacccaccacgtggggatttgcattgatacctgtgtcttttaagccaatattcatcaagctcctattgttggccagaacccgtgttgagtgctaggtagaggacaaaagtggtgcaagcctgctcccctcgtgctcttgggtcagaattccagggattacagcatcacgggtctagaccaagcttctccttaaccaagatgccgtgcctaaaactcgggggtcgggggtggtccatgacatttcatggggaaaattacatatgtgtttcctccagttgaaatttggcatttcctttgcttctgatgatagatgataaaccatcttggggtccctagtacctgtggctttgccaacaatagaaatcacagatgttttccatatcataggaaagttttgcaggtttaaacatatcgcttatgcccacatgcctacttcaaaatttcaggagttctaagacctgctactgaatcttcttatttatgtattaataaagcagcacatttatatccgtatcactgtgttgaaatattttgataattattttccaatacagttgcttttttggtaatcttatatattttattttatgtatttaaaaatgttactccaagtagggatctgtaggttttgtgctgtggcacaaatcattaagaagccctggtcattacacaaatgactccttaaatttcaattgtgatgagtgctaggaagatacagaaggacttattccaggggccctggccttttaactccctccaaccatccagtgaggccaacaggcctcttgacaaatgggtcttatgtgtgctttggactatggcacccagcttggccagaataccccagtggaacaaaatgcaaaagaagaggctttaagggtgatgagaatggggtagctggctgcaggaaaaacatgagttgcattcttattgctgtcttctgggggttggtggggagaggtcattctcgggctgggaagagagaatacaaaatagcacacacagttgtaaaatcccttgcagacagttctgtggcccgcaagttccagctccagaaatagtcactggagtctaattattccttaccaaggagagagcctggcatgttggtttctgaaatgagatggggcacctagttgtagctaaggtctgattcttggatatgatatgtctgcagacatcaacatgaatcatggctctgaagaggtaatttctaaaaaatgagggctaggctagaacatcgcacctgaatcgaattctttcactgtggggttgtttaaagctggacaaagacaacaggtgtcagagaattgcagaacatagtgctgttactgtttttgaaaattgcacagtacggttttttgttttgttttgttttttggagttggagtttcattcttgttacccaggcaaggagtgcagtggtgtgatctcggctcactgcaacctccaccacctgggttcaagcgattctcctgcctcagccctcccaagtagctgggattacaggtgcctgccaccacgcctggctaatttttttgtatttttattagagacagggttttgccatgctggtcagactggtctcgaacctcaggcgatctgcccacctcagcctcccaaagtgctgggattacaggcgtgagccaccgtgcctggcctgaaaattgcacagtatgttaactgtatgggactgggctttctccccctacccccggtttcattttaccctgcctgggtcataacctcccaaagagggattataaatgagagcaaatgagtcttgggaatatcatgagaccctttcatgccctgtttctgtagcctttgagtctgaagcaacaagggctggaagcattgaggccgcacctgactcatttccacagccggccgaggggtgcaggggttgagattcccaagtgctcgattttctccccagctgctccattttctccccagctgctcccttgctgactttccgtgtctgaaatgacccccgttgttttatgataaacctgtgagaaatgggctctccccagaacttggtaattgatgaccagttgatgtatttttagacctgagcttccacccaccgtgcttgtctggaaatggctggggcaggcagccatgttagagggaagctttttgcccaaagacaccatctgcagggggaattgtgggtaaaatatggcagcctctccaactggggcagggggtgccctctgaggtgattcctgagcttccacagggcagtgacctcagggagggtggaagactttgcttccattcctagtggtaaccttcctttaaaaattcatgtattaacctccaccaaagggctgtttatttagagtggagtgacctcgccctcccttagaggtccttctctatttgtgtcttagagtgctggtgtcccttcctgaaacagagggtgtttccttaggggacacatttgcattgacaatagtgaggtcagagatttgcgtgggaggcctgcaaaagcaaagtgagtgagtgggaagggcagagccctggagagacagagacggggtggtccttctggggctagaaatgagggtgaaagcatggatctgccaagccttgggtcacacacactcaagtcctgctaccctgagggaggtcagaggcttctgggccttcctggagcccacggcccccaggagcgggcgacggcaggtggagctctgcagggcccatcaggggcctcaggggtggcctcgtttggctgccttcctttagagccaaggaagccacaccaggactgggctggtgtctccactgccccacccagatctcagccaaggccgaagatctctgagcagggtctgggcacactgagaaggcctctgggtgctgcatctggccctgggaacacattggtgcggttggaataaggatgggggaagcacggagggacagctgccaacctcatcttgctcctgcttgcagagtatgagatagagaggtcgttctttcttcgaatgaaatgtgtcttggcgaaaaggaacgcgggcctgacctgcagcggatacaaggtacggggagtcatgggtgcggggaggagctggctaagggtcttcaatgtgtgttttcaagagcgtctgcagaaaggaaggcacgggagcacaaactcgtcatccccactaatgtagagctctccagcaacgtggtgcacagtctcttggaggctcatgtgagagctggtgttttaggaggatgttccagctggctggaattcatcgcataagacccggaatcagtgtggcttagggcagattttattaataccttggcactttccatgtggaccagtcccagtggagccaccgcctctggagtttatagaggcccatcctcctgggcacagtgcagctggcagtggtatccagagcacggacactgcccttccccttgggatgctccaccaagttccctgccgccgatgacggtgtgcaccacaataatgctagcgccctttccaaggtccaaggcagagctttcatctgcggcaccacacctgggccactccctcaagcatctcagctgcccattggaatgagcagcactggcccagttttctagtcaaggaccagaggagggacggcagaaggggcttggtggcggagctgggactctgagcccagcccatgctcctccctggctccacgtctctgccagacaccaccgcttgttcttgttaattccagaatggaggagtaggtcatgtctcagggcacgagagtcagccgccccccagggaaaagtgggtcgggggaagtctgtgctgagtgccccccgccaacacttttgtcccctctctgggctccttaccctcctcccaggcatcttcactgccatctctccaacctcagaggacagacatcataacccatcaatatgaggctgaaagctgccagaaactttcttccaggaggatttgtctcttagaaaagaagggaggaggatggggtgagaggaaagggcacttttgtgcctttgtcctctctttctggaaggccccgccccagctcccctctttgaccccactctgagctcctcctttgacctatatctcactgtgctgttacagttcgggggacatgtttcttcctttttgtcccagatactaagcctctttgggccacggtggggccccaggagccaacagacattcttcagggcacttgggtctttttgttaagggacagggtcttgctctgtcacccaggctggagtccagtggtgcaatcacagctcactggagcctcaaactcctgggctcaaatgatcctcccacctcagccatctgtgtagctggggccacaggcgcacgccaccacacccagctaatttttaaaattttttgtggagatggggtcttgctgtgtttccaggctggtcttgagtccctagcctcagtcaatcctcctgccttggcctcccaaagtgtcaggattacagacaggagccaccgcgcctggatgggacttgggtcttgacttttttttgccacttattaactgtccgctgtccaatcttaagcaatacacaacaccatcttgttcttggtttcctcattagtaaaatgggagaatagactggaaggattttaagatttgttttagccctaaagatgatgaatgcattcagaaatcctggagaaagagttttggaacagagaacttaaggctaagattcttcactgttgtcatgatgatattgaccctgtcaagatttcacagactgcagcttgaataaatgcttccagtagtgacgctcgaggctgtacagatgtttctgtttgacaccgaaacactgcattcttgtctgtatggcttttggctatagcaattggaagggcttctgtagggccactctggcttattattatgaggaaataaaatcttgaattataaataaaggaaataaaaatacattaaaaatgaagacttcaaaaaattgtactggggcagggcacagtgattcatgcctgtaattccagtactttggaaggctaatgtgggaggattgcttgagcccaggggttcgagaccagtctgggcaacataatgagaccttgtctctacaaaaaattttttaaaaaattagccaggcacggtggcacatgcctgtggtcccagctactcaggaggctaaggtgggaggatcacttgagcctgggaggtcaaggctgcagtgagcctgattgcactactgcactccagcctgaatgacagtgagaccttgtctaaaaaaaaatctacggaaagaattgtttatttactggtacagcgtgtcgagtgatacagatgccaagttcaatcccattggaaggtggtaagcagcatcgtcagtgatgcaagcactgtggaacaaatggttggcctcccccagatgcctttattgtgttacctactcacagcttggcagtgagctcatatgtatatctccatcatatatgacagggccctaatttgtagttacttacagtacagtcaattggataagacaacccttatattttattatgatattttttgttgtcttgtgagtttgttttgttaccctggctggagtgcagtggcacaatctcggctcactgcaacccccgcctccagggctcaagtgatcctcccacctcagcctcccaagtagctggagactataggcatgcaccaccatgcccggataatttttgtattttttgtagagaaggggtttcgccatgtcaccaaggctggtctcgaactcctggactcaagcaatcccccgacctcggcctcccaaagtgctgagatggcaagactgagccactgcttccagctgttatgttgtttcctaagaagcacagctctccacttctcctaagcaatgaaccggtgcctgtcagcacattgggccgcacagtggagtagaggctgggctgggagatattctagcatgtttgagaaaatgagccaggaggagtgggctccagcccaaccccagtggccagtggctgaccctgccctctccactcccaggtcatccactgcagtggctacttgaagatcaggcagtatatgctggacatgtccctgtacgactcctgctaccagattgtggggctggtggccgtgggccagtcgctgccacccagtgccatcaccgagatcaagctgtacagtaacatgttcatgttcagggccagccttgacctgaagctgatattcctggattccaggtgagttcggcacctgccacagtggctgtggccttctggaagacaccggtggtggaaatgggtccctgaaagctgccatcttggccaaatcataacaaggaataagtcataataggaatgtggattaagcaaaaccaatttatgaactgaaagaacatatgtcagccttaggactcaagggcttgttttactttatttacttattgatttacttattttatttacttattgattacttattttatttacttattgattacttgttttattttatttacttatttgaatcactagagtttgaaatgaaaacatgggctgtgagcacaggttgggcttttttgaaggccatgatgtcagagctctgcctcctgcgtccaaggaggactttagaacaaacagaaaatttccaccctgtgtgcggtgtgtggggggccttggcactcaggctggtgtgaagccaccacagggctgaggctgggagcagagacgctatctaccctgggggatgctcttcccacagctcatgggtgccctgtctacatctgggctgggaggaggggattggatgaggtcatttctcctggccttggggagtacctctctccagacccgtgctggagtggccttcactctcccctagaaccggctgcagtcccagttttttaactgagtctgcagttaaagtctgagttttttaaaattgaagtgaattttaattttaattaattaatttttttgagacagagttccgctcttttgcccaggctggaatgcaatggtgcgatctcagctcactgcaacctctgcctcacaggttcaagcgattctgcctcagcctcccaagtagctgggattccaggcacccaccaccatgcccagttaatttttgtatttttagtagagatgcggtttcactatgttggccaggctggtcttgaactcctgacctcaggtgatccgcccgcctcagcctcccaaagtgctgggattccaggagtgaaccactgtgcccagcctaaaactgaattgaatttttaagtgacaaacgctaactgcgtttggttttcagggttttgtggtgtttgtggggtacattgtgatgctttgacacatgtccactctgtggaaccatcaaacccctcccaagtcttgaggccacgtgctagtcaggcctcttccatgttcttatttgtaaaacagcagcgcagcctgcccactcactgctaggaaagatgagattagataatagacggaagcattggaaacagtgaagcctctcttacctgcaaggccactttagctcttggcaggtaggttcctcagctgtgcagtcgggaataagccatcagagaccccgctcctggcgtggggtgtgtgtgtgcgatgagtctttggcggggggaggagagatacattttgctttctgtatgtccagaagccaggatttactgttttcttttctttttcactttttaaagttgtggtaaaatacacatcacataaaattgatcattttaaccatttattgatgttctatagagaaaaaacagatcttcctggttaggggcaagagataaagacaggagtcagtttggctccttgtcgacacccttcaggaccactcagaagcagggtgagtgtgtcagggtcaccagcatcttcccagaaactccaagcagacaggaaacagcgctctttggggaaagctgccagcacctctggggacggccaagagcgacaaatgccattttcctgccatgcagagggaggcgctgcagggagagaaggcagccaagctgccccagccagggtggacccctctgctccctcttttctgacttgggagccacttctgagaggtggctggaaggacatcagctgcccaaagtcattatcagagacatctaggaggatccaactggtttcccccttgtttcgtctcctagttttcctctgggccttctaggaaacccctgagactgatgaattctggagaacaggaaagaagtggtctccccagaggagagacctgagggcttttcaagccgttcaatccacattgcctggaaaggcagccaagggtagaggaggttgtgcctaaaggaggcctggacagggcctggatggggctttgcagcgccagagggggctcccgcgtctcagggtgtaggggctgcacccctggagtgaacagaaaagaaggctggtggtcttgaaggagacatcctgcctctcccagatctctggttgttcctgccatatcaggaaacttctagcaaagccttgaggccttttctgagctgcagtcacatgggaggggctgaaaggggtcagaagaatgctgcagaagccttcccagtcaccacagtcagtctgtgaccaaggggatggggcctgggctggcccagccctgggaggacagcagagtggccaagcagggtgggagatgtcccttctgagtccaaaccccagaagccagacgagggctttgcccgaagtccagcggccccaagtcacaggagcgagggtggtcgtgggcctgtctggcgccacaccccgcacaatcccagacacaactgaactcgccgtaacctgaaattgggtttgtcagggttttgtggtatttctctttgaaactggagctgatgcttttgctaaggatgggtgaacacagcgatgtttggggtttggcagattcctctgacaggtcttcagacactagaggcttggaaaaaaccgggagggcaccttgccaaacccctccatttccctttaatttttaaagccagtgtgtactttgatgagaaacttaatacatgtgtttctgattcatttacacgtttggggccgttgttctgtaactttgcatccaaagggtctgggaagcctctttcatccccacacggtagagatgcctggttttctttttgggggaaaacagacggctcaattttcctgccacacagagttagattctgatggggcttgaagttctaggtggcccttaggcaagttccctgagccccgaatggctctgggctctacaaggccccctccccgcatccctctcccccaccactgcaagccctgtctccttcctaccctagaaggacaccatggaaatgagtacaccaaacagggaacaattccagggaaacatgaggctctccgagatttacgacccaaagcttgagcagatcttaacagaaagggaagcgggttaaagaatgaaagtgaggtcaagtttttcagtttaatttacagctaacgtctcctatcctagcaaggagggcccccagccccagccctccctctttccccgacctcacccggcccccaggactgactgcaccatagcctcgcctgccttggaatcccttcatccctctctctttcatctgttcttgaaaatctatcaccaagatggtgaggaccacctccttcgaggacatggtgcccggccccattgcccaaagcctgggaaaccatcgttgccacgtgcagcttccacctacggccagagcgatcctgatgcgggtgatgatgtggtcttgggtactgagagccacttttcttcaaagagccgaagtgggaaattaatatgcccagggctcgatgagaacacaaaggggttgtgtcacataagccccaggaaaatgcttccatttctctagagagcttaaggctttccttttagtcacaatatcttagggcgttatcctgtcttctggggggtctgaaccaatcctcccctcataggagcctaaaggtccccagttattccgtaattcccaatagtgggaatcacccagcggcagcatcctgagaccatctgtgccaatcaacagtgtctagcgtgcaacagaggtttaaacactcgcacccgcagtagccaagatgtgcaaacaactgtccacagacagagggatggaggaaccaaatgtggtgtctacataaaacagaaacgtattcagtcctaagaaggaatgaagttcagacacatgcctcagcatggatagccttggaaacatcatgctgagtgaaagaagccacacaccaaaggccacatggtgtgccattgcacggatatgaactttctcgaagagaaaaattcctagagacagaaagtacaagggaggctactgggggctgggcaggggacagtggggagctggtgtttaatggggacagagtgtttgggatcatggaaagctctggacaggggcagtgatgcctgttacacaacactgtgagtgcaccaaataccactgaattgtacactagcgctggtaaccatggtgaattgtatatgtatattttaccacaatttataaaaaacattcacacaggaccgtccccccgaagccctccaagagtgggttctttctcaccgtagcagctttctcgcaatatcagtatcaaagtccacttgtaagcattccccgataagctgaacttggaaaaaggctacaattttaagccattccaaacattctcttagccggtggtttcagaagaacattcccattcatgaatagtgctacatcctgcaccgggctcgagttcaaagacttgcttcttgtaaaaaagatcattctcagtttccaaaatcaacatttcccgcctgagccttttagcacttgattagttggcaaaaccaatattagtttaaatgaaaggcagtctgcagagtggcgtaactcactgagctgccatgcccccacagggtgaccgaggtgacggggtacgagccgcaggacctgatcgagaagaccctataccatcacgtgcacggctgcgacgtgttccacctccgctacgcacaccacctccgtgagtagcacgcccaccccagccacgggaggtagctggtcagggaggaggcgctgaggacagagccgggggacgtgtcccttttgttggtgcaataatcatccatgatacacacttgaatctcaagccccaagtgtggcttcctccaccccgtgattaagtacggctgcctgttgtcggttctcaagcagccacgcgcaccctttcagggagactctagcaggtgtaggatcaggaagttgcctggattctagattgtggatgtggaacctaaactctgtgatctggacaccatttgcgaataacagcaacagtggaagactgctagttatggagctcttactgctgtcgggcactaagtttaagtgactaaatacattaccagcccagtgagggagggtctcactgtcatgatcctcattttaccagtgaggatgctgaggtccagataggttaagccgcttgcccaccttcatacagctggatggtagcggagttggaagctgaacccacgcagagccctgcctccgactgctataccccagccagctaggggaagcccagggaggccaccattccacgatgggagaggtcatcttgggacggggtgaacaaacaccaatttgatttgccaacggaggcggtttgggaacatcaggatatagaggcggatgctctagtcactgaaatgtttaaagaagtgacacttttcttttacttttttaaaatctaaaaaaaaaaatctttttgagacagagtcttgttctgttgcccaggctggagtgcagtggcatgaacttggctcactgcaacctccgcctcctgggttcaagcaattctcctgcttcagcctcccaagtagctgggattataggtgcatgccaccacgcctggctaatctttgtatttttagtagagacggggtttcaccatgttggccaggctgatctcgaactcctgacctcaggtgatccatttgtctccgcctcccaaagtgctgggattacaggcatgagccaccgcacccagccacacactttcagaatccaaatggaggcaaagactaatttggatggagtggaatgcctcatcctcctgctgtccagccctgccacgcccatggccagtcgggggtgctttataatggggtgcagacagttagaggagctgggtcttctgcagtgtggcccagatggcatgtcctctgttcttgctctgccttctgttggctcagggacgttagaggacaggttgccagtgtcgagtgggagggggacggcaggcccgcaggccgctaggtccacagatgcgtggtgtgctgggctccgtgtggactgggacccgggaactcgatactcccagggtgtcgctgttgctcttccctccccaaatctctatggacagaaacccgtgacaaccaggacttatggctgagcaggcacagacggcttcttccttgctccttgactcatgtggagacttggaggtgtgaacaacccttttgtgtcttttgttaaagaccaaatcatgatctcataaccatctctgtcattctggagaccaagcttggtagagaagcagctgcttagtgttcggatggaacttctccgtcggtgtcactaatatgggagctagaaagttttcttgagcaaactgggtatggtgtgtcaattctagaatcagatatccaggagacttgatcaggcgggtgtgaagagcagagtggaggggctctgcagtagcaagagcagttgggagacgggagaggcatttgcctcgagggcatagagctgtgctgtgccctagaacagtctgggacttggagagtgaaggtgagggctcatacctccacacgctccccctgccactgttggggcggaggggctgaccagctgttctaagggaaagccccagccctggggggtctggagcccccttccatggaggcaggagaatgctggggagtttaaagcatacccccgaattacagcaagagaagacttgctcttcacagcgggctgaaaggcaggaaattaggcctctaagcacagagacaaaactgagggaatcaaaaatctctttttttttaatgagatggagtctcgctctgttgcccaggctggagtgcagtggcatgatctcagctcactgcagcctctgcctcctgggttcaagcaattctcgtgtctcagcctcccaagtagctgggattacaggtgcccaccaccacgcctggctaatttttttagttttaatacagacagggttttgccatgttgagcaggctggtcttgaactcctgacctcaagtgggactacgggtgtgagccactgcacctagacaaaagtcttctttttaaataccatgtcttttatctcacactgcctggctaacccaggaagcagggatttttttttttttttttcagacagagtcttgctctgtcacccaagctggagtgcagtggtgcgatctcggctcactgcaagctcctcttcccgggttcatgccattgccctgcctcagcctcccaagtagctgggactacaggcgcccgccagcaagcctggctaattttttttgtatttttagtagagacggggtttcaccgtgttagccaggatggtctcaatctcctgacctcgtgatccgcccgcctcggcctcccatagtgctgggattacaggcgtgagccaccatgcccggcccgaagcagggatttttttccccatttgctttggaacagtcatgaagcccacagtggtgctcagtcagtgcctcctctgtgtccatcatgggtagatgctttcacttatagactctgacctgcgggcagtttggggagctgtgtccctctcgtgcccttttcccaggtgatcagggtgagactcaggggacacttgtccaagggcagcagtggagctggggcaggaccaaagtccagcccattggctgtcgtgctgtcagccgtcaccaccacaccacaccacaccacggggcttaaccttggagatgtgggctggtggctgttctgtaggatcccagccctcctgagcttgcctggctcaccagacccacaaggtgattttatttgaggggtcttctgtggtttatatgatgaagccactttatctcacaggaagtttccagatattgaagttgtccaaggggactctgaaagggcaagcaggcacaggctcaaaaaggtaggcgtgtttagaaattagacggggcatggctttcttttccaaatgagccagaattggtaattcaaagaaaacagaaaatagcaagattgacagtgattgctactgtcctgtgactctgaccttagctgtgctagagaaacaaccagaaaagactgcaccccagccaggccggtgggttggtgtggtcttggagttcaccatgagtgtgcctgcctcagtttcccctggcagctttgagagggaggggaagcaaggatagtctcagatgatggggagttctttggttccagcgtgggaaccacctgcagggctgagcagcagcctcccctcagagcactcaactggaatgtcacacgcctctccaaagctagaactctctgggaagacagtcaactcccaagcagggtcttcagagtcggggtcttcatggtatggagctttgtgattgtggaggcctcactctccttcccaggtacagaacctgggccagaggggccaaccccaggcctcctgttcctgcctctccatccccagggctgggtggcacctgtttgatttcctgaaactccagaagctgccccagagcctggagttgaagtgcaatggttgatttggacagtgactagacatggccaggggaggagtgagccagagaagagaaggagccacaaagggtgttgtccactggctacagccgagggaggctggcgctcaacgccggggataccccagagccagtgtcatcaagcagaggggagagtgagctgaggtattgatacccctgtgcctgtcagtcagtagctggagggcagctctcagggggccttgattgcctggcttacccccaacatggtcagggtgggccctgccaaagaaaggcctcagtgggggagaacaggtcaggccagtggatgtggctgggccagagcaaggctgatgtcttcacagcctgtcgtcagcttcctccctgctgggccttcatccaggctgtgttaagatgttttctgttctaaccttccacaagtttctcccttccgagccctgtctgtcatctttcccttgtccacagaggccacgcctctctctgggggtccctgttggctgacaggagcgtccttacacccacaccactgctgtgtgagggctgagggaagcccatcccccacactctccagctctgtctccactcctggctttgtaccaatagctgctgctctcctcttggggacatgtgccccactgctgcttggccccacagagtcccaaccaagggacctcaggtctggacgatgcttttgtcttgtggtgtttgggtcctgatggggacttggggactgtcttagtgtcccaggcacaattcagccctcaactaggtcattccttaatatgtccgtatcctcactcaagttgtggggagaggcccttcccatattatagctgcagaggccgacttggggaggacaggggagaagctgagaaggtgggaggccccattttgaaatgggacttgttagtcctgtcacacagtgctttggtggctgacagcccggctcagggcctggcttgagggaagggcagtgaggccagacttcctattcagcctcctgccctcccaggttccaccagggtccccactgtggccactgcagacctgagactcaagtctttcaactccatcagctagagctggccccgtggctgcccgagggatgcggggacacaggcagcctgccagcttcccttccatctgccacaaccgagtgtagctggaggtagccagcagtgacagcaacccccgcccgggcccctcaggactcctcacagtgagatgcccagacgcatctgtcgtgggcagtgggtgaggtcaccgagagcaggaacaaagcagacagctgccaacagccaggacccgagtgaggtcactgtcccctcttctggggcctcgctttccccacaccggtagccaaaagccaggaacctctggggtcagtgccaagggctctgcagaggcctgattggaggtaagaggtggtggtccgggagggccagacagcccgatggtttgcacacgttcttcagaatattatcttcactgggagcaagagtccacaggggctgaagaaatcgcagcccctaaagagaaagaactcccagcctccagaaacttgagctttgtgaggaagagcagggccagcagcacaggctttggggagcacaggtttgcagaggtcaggcgagggggcacctcggaccagagaagggggcatgcgggcgtcatgtcggtgtggtctgggtgtcaccaggtgagtctgtgaagtcagagctgtgccacaatattccccagaactaacttccttcccttccttccctccttcccttccctttcctttcctccctccctccctttcttctttctttcttttccttctttctttttctttctgtctttcctccctccctccctttcttctttctttctctttcttttctttctttctttttctttctttctttcttccttccttttctttttctttctttttctttcgttctttctctctctttcttcatttttattttttagagacagggtctcactctgtcacccagtctggaatacagtagcgtggtcggagctcactctaaccttgaacttctggcctgaagtgatcctcctgcctcagcctcctgagtagctgggactacaggcatgtaccaccatacccagcgaatttttaaatgtttttggtaaagatggggtcttgctatgttgcccaggctgggcttaagctcctgtgttcaagtgatcctcccatcttgacctcccaaagtgttgggattacaggcatgagccaccatacccggccccagaacattctgtaaagaaaagtgaacacgggatcatcataaatggaaccactgtgaccctcccaccccacgcctcacccaccacctgaggtggctgattaaaggcaccatgctccagcctggcctcaggaaagccgagctctgcctccccgctttctttgtttcatgtttgggagactttttcttgtatgtagggggagctggcaaaggcttgtgatctgttgacccagaccctcagggggggctgagcacagcctggtccataggtggagaagggatcagtgtcagtaaacctgacagtttgtgtcatgggacactgggctgtccatggtttggaagaaccgtgatgtccacatggctattcttccaaggttgttgagaatttcacccggctctctaggtaggctcctgcccagaatgggccaagcccagaccacaaagagaacacaggccatgtgcagctattaaaacatttcaatgtccactttgggaggccaaggcgggcgggtcacttggggtcaggagtttgagaccagcctggccaacatggtgaaaccccgtctctactaaacaatacaaaacttagccgggcgtggtggcattcgcctgtaatcccagctattcaggagtctgaggcagggagaatctcttgaacccaggagacggaggttgcagtgagccgagattgtaccactgcactccagcctgggcaaaagagcaagaccctgtctcaaaaaaaaaaaaaaaaaaaaagcaaaaaaaaagcaaaaagaaaaaagcatggggccatattcctaagggcttgaatagattttgaggttgaagagcttagcgagcactagtcctcttgaaatccgtggatggatcctcagtctgagcctgctgcatctcttggttattttggaccataaacaaattggccaagtctcccttaaaaggtgagcccacctcacccccatacgtattattcaatgtattactttgaaagtaatagcagccagatgcggtggctcacgcctgtaatcccagaactttgggaggccaaggcaggcagatcatgaggtcaggagttagagaccagcctggccaacatagtgaaaccccgtctctactaaactacaaaaaattagccgggtgtggtcgtgggtgcctgtaatcccagctactcgggaggctgaggcaggagaatcacttgaacctgggaggcggaggttgcagtgagctgagctcatgccactgcactccagcctgggtggcaaagccaagactccgtctccaaaaaaaaagtaatggcaaaaatcgcaagtacttctataccaacctaatagctatagagaactttccagaggccgctgctccctcctcccacagctgccactttgaggacacctgggctggactccagctgtgccctcaagctctgttggccccggtttcctggtgctgcccacctcccacctcccactgttgtagtgggggtagaatgaggcaatcctgtgaaatgagctggaagtagacaccatgtatcttttcattagagaagcaaacccccaaaggagaagcattgtcaggcttctctctttgccatggcctttgcctatacccttgagcagtgatctgagtcggctgagatgcagatgttaagcctgggcagaaaagcgctgctctctgcatggtccgggagagacccctctccagccggtggcatgctcgttacgcaacactgcctcatgtccccaggttcatcctgacggggtggtggggcttgatggagactggattcctgcctcccaacccccacaatcttctctcccatgtaaaaaacaaaaccatttcattctggttaaacctcctcctcgttggaaatttagaaagtcaaggaaagctgaaaagaagaaagtgaaaattatctgtcattttcagtcagataaaagttaatatgtattgagcccttcagctgtgtctgccagtgttctaaatcctcaaatagatcatctaatctttcaacaaccatatgaagtaaggactgattatcctttttttataaatgaggaaattgagtcacaggggggttggtagctagtctaggatcacacagtttgttggagggggtagtgtatgcacgtgcccactttttcataattagggttatactttacacatttctgaatcttgtcttttcttctgttaacattgtatcacacatttcccataatataacaatttcttattaatcatcattttaatggctgcatagtttgccataatgtatttactcttttccctaccgttgaagagttaagtctctccccaccccttttccctgaattttcagcaatattgcaatgaaaccctttgtaggtaagtctgtgtttgcacacacagacctgctcacaatttccataggatcaattcctagaagtgagatcagtgtgtcagagggtgtgagctatcagactgctttccaccaactcatccttccatcacacatgaaaatgcctctcactgggccaggcgccgtggctcacacctgcaatggctgcatagtttgccataatggcaaactatgggagggcaaggtaggcggaccacttgaggtcaggagtttgagaccagcctggccaacctggcaaaactggggaggctgaggcaggagaattgcttgaacccaggaggcaggtttcagtgagatcatgccactgcactccagcctgagcaacacagagagactctgtctcaaaaaaaaaaaaagagaaagaagagaagaaagaaagaaagagagaaagaaagaaagaaagaaagaaagaaagaaagaaagaaagaaagaaagagaaaatgccactcaccatagattagccggtgtcacctgttggcctttcatttttttttttttttagataaaattcacctttctcaccattttcagtgttttttagttatattcacagtgttgaacaactatcacctttaattccagaacgttttcatcatcccaaaaggagcctgtcaccccagtccccctcgtgcttcagcccctggcacccactcatttgtttttggactctgtggatgtgcctattctggaagtttcatgtaaagggaatcatacaatgtttgtttctattttaatgtctgttgatctgatggatggatctgcctttgagttaaacaagggagttgggcatttgttcatcattttgcccattatatttattctttgatctttgcctatattgcttttagggtctttgtgtttttatcaatctgtacgaaccccctatatattaaggtgaataactccgtgcagcattttcttttgcaccaaaatattttgatgtggatgagaaagagccatctgcaaggtgaaaaggaaccgtaaagggccacagacagcccaggagtgtttgggcagagactgggggctttgcccagcggtatgacaggaaggctgaatttttgttgcatatgagcctcaaaggctgaatttttgttggaaatgcaccttggggagtttccttcagccccagctggtacagtcacagactcagcccctttggccacctccccagatctctgctcaggcagctgctagttaggtccaggggccagtcctgccttgagaagcaggaatgttctggagctgaggacccagacatccaagggtgtctttctagacttgtgctatcctcctcttccctggagaagcttcacctctccactgcccacctgcgggttctggcactttcctcccccacctgcctcctggaaggcggtgaggtggaattgtggtttatgggtgcaccgagcctttggctgagctgcttagcggcctggagtttgcacccaagcatagaagacaggcccataggcccaattttcaggaactctgcagccaagtagaggtctttcctacataaacaacatagcaaattaatgggcccaaggaaaactgggattaatgggaagaaaatataaatggcaacaaacagtttcactgtgaataccctcatgttcctgaacagcaaacatcagcaacagcttgacacttggttgaatgcacttaactgactactttgtgtaaataactacatcactcaccccccctccccattaaggatttggggattaaaacataattgtggcattttgaaaactaaaaagcagattgaattttttcattctgccagatacaaactttggtggctaatgtttccctcaatgaaagcaatgactgttaaataagagttcttaatgggtgggaactccttgaagctgaaggcaaaattcctgtgtgcacatgtatatgcacgcgtgtgtgtgtgtgcacgcacgagacgcacacagacatgcaccctccagcggagaaagcccgccccctttgtcaagttctcagaggtgtccttgggacagaggtcaccgttgggggcagcatcccagaggtggggcctgcgaagcgtctgaggactcctgtcaccttgtgcttgcagtgttggtgaagggccaggtcaccaccaagtactaccggctgctgtccaagcggggcggctgggtgtgggtgcagagctacgccaccgtggtgcacaacagccgctcgtcccggccccactgcatcgtgagtgtcaattatgtactcacgtaagtcacacgtatttgtttctctccttgctcttttctcttccctgtcccacatcggatggctccaataagcaccatctctctttctctctttctcaaactgttcatttgtcttctgttttttttcttttttttaattttttttttttaggaatctggtcattttggaaggtgcaaactatttctatgctcagcggtgaaagccaagtgctaggctgcagggggagccaggaggagggggcctgccctgggcatagcttcggatcccatcacagaacctagtgaggagcatgggggcggatggtgatgccccccatcctgaatagggtgcaaagagggtgcacaccccccatcaagaatataaacttgtgctatccatgcctataagcctttaggtcatcttagatgctcctgctgtttgagacaggaaatatcccattttttacctgtcttcttatagagcctgttacaaattaatcatggtgaatatttggtcctttaaacactccagaaggtcaagttcagtcgcaaatgcctttttttttttgtaaattaaaaaaaaatatgtttttgtagagacggggttttgctatgttgcccaggagctggtctcgaactcctggcttcaagtgatcctcccacctcggcctcccaaagtgctggaattacaggcatgagccacggtgcccagcctgcaaatacttttaaggccattagaagcaataggacagatgtctatctggggccatatattactttccacccaccatagctattgtacgttcaatcaccttgctccaggctgtgacccttgccatgccgccagccccatgatgaaaagagttctcgtttgcactttacatggggtgaggatttaggctctaggtttgttcatagaatgactgtgtcttagaagtcaagtgattctgacaaaactgtcagggagaaaacagtttagccctttagttattcttcctgagcaaatgtgtgggctggttctccaggtcgacctctccttgtgtgaacatgaccctgctgagttggttctttagggcagagatgggcccccgatgtgagaatgcacaaagctggtggtcaggctcccagacctgtgaagagtcccggactcttgcctcctggggtgctaactggagaggcagctgggccacaggtgtgcatgttggatgcaggtggacctgatcaatggtatttctgcctgtctctttttcccttggtggctttcctcatggcccacgacctccccgagcaatgtgtttggggttttattggactggagagagctctgacctggctcagcatttcctggggtggcccagcctggggctgcagatggcttttataatgagggtgagctggccttgtctcaaatcccatccacatccaatcccagtgaaaagacacactggagcactgagaacgccctgcccaagggctggggccagggaagctgctcggcctccagcgcctgctggacatgactcggcccactctcgccttccagggagattgaatacaaggaacttcagctgtccctggagcaggtgtccactgccaagtcccaggactcctggaggaccgccttgtctacctcacaagaaactaggaaattagtgaaacccaaaaataccaagatgaagacaaagctgagaacaaacccttaccccccacaggtaacacgcatgtcctgcagttttggggtgctgacatctatcctaggggttcgggacacctggacacattaaggaatggggagcctctcattgcacagcagggatctccctgccgtggagcaaggtccctctgggatgtcttgcctacacagtagtgacagcccggggaaggccgacatcccggtgggctagtcaagtttaggaaacagaagactaaattggaaaggcacttcagcccactagaatccatgggttagattctaatgggcttgacgggttggaatccacgggttagattctagactggtgggttagaataccagtccattgtatttctgcagcattttaaaaatgaaagccctccctctttttaaaaaagtagtttgtgagctctcagaaatagcaattgtcggttgggcgtggtggcccatgcctgtaataccagcactttgggaggccgaggcaggtggatcacctgaggtcaggagtttgagtccagcctggccaacatggtgatactccatctctattaaaaatacaaaacttcgcgcctgtagtcccagctactcaggaggctgagacagggaaatcgcttgaacccgggaggtggaggttgcagtgagctgagacagtgccactgcactccagcctgggtgacagagcaagactccatcacttgttctgtgccaagtgaactttggtaatgtggtcattagcagatagaccagttgaacgtcacggcctccacattatgacaaaaaaaaaaaaaaaaagaaagaaggaaaagaaaggaagggagggagggagggaaggaaagacggaaggaaggaaggaagggaaggaaggaagaaaagaaaaaagaaataaagaaagaaagaaaaacaaagaaagaaagagaaagaaggaaaaagagaaagaaagaaagaaagaaagagtccatgtgtgcctgatgtcttgttagcttggggtgggggatctctttccaccctgggagcaggtcactggggtatcgctcgctgtgtgcctgtccccagtgggaccttgcagtggtggcgagggtaggggcagcccttggatggggttgggccccgtcgggacggttcttgcagggccggaaggcagcttcctgccggcccctcgctggcccttcatccatcttctttgccatgcagcaatacagctcgttccaaatggacaaactggaatgcggccagctcggaaactggagagccagtccccctgcaagcgctgctgctcctccagaactgcagccccactcagaaagcagtgaccttctgtacacgccatcctacagcctgcccttctcctaccattacggacacttccctctggactctcacgtcttcagcagcaaaaagccaatgttgccggccaagttcgggcagccccaaggatccccttgtgaggtggcacgctttttcctgagcacactgccagccagcggtgaatgccagtggcattatgccaaccccctagtgcctagcagctcgtctccagctaaaaatcctccagagccaccggcgaacactgctaggcacagcctggtgccaagctacgaaggtgggtcaggtctgctcgtggggaaggtgggaggactgcgcacggccgggagccgaagcagccatggcggtgggtggcagatggagacagaaccctcacgctttgggcaaacttgccctctttctgcttctaagtagggcttgctgtgctttcttgctctcaatgcaggtgctcctcgagagtgagaaatggcagtctgcctgcctcggggacactagtgacagtataaagggcaaaggaaaaccgagtatctggccttcacgtaaatcctggccacattcaccaaccaaagggggacagtgattttcaaaaccagctcccatgtgctgagaacaccccagctgcatttcttttgcaagattcctttccactccaaccagaagtgaatatttgagacaaacggcctattggctattttcccatgccagttttggaagtggggaaaactatggtggaaatttgtgggcttggggacagaaatgccactcaccaacccagggcaaagaacacaaaccctccaggcctcagtttcttcacctgtaaaatggggtgaagctgtgatgtgcctactcccaaggacacgacacacagtagggacctgccctgtacatgctagttcaacagaaaggaatggcctttcaccttctcctggtggcaggcaagcagatgtcctctgcggagataccgccagctccccaggacgcagactgactcctgtttgctcgctggaccaaccccaggcagaaggtggaaggtgggaacagaggtttagctgcaggacatgtattcccattgcaccgagacctaactgccgctcagagtgtagaccgagatggtgcagatgcctgcagtgccactaaaatgtgggtgaaggtgacatcaggattatgtgccccaggccgggctcagtggctcacacctgtaatcccagcactttgggaggccaaggtgggcggatcacctgaggtcaggagtttgcgacaagcctgccaacaagctgaaaccccatctccactaaaaatacaaaaattagttgggcatggtggtgagcacctgtaatcccagctactctggaggctgagataggaggatcacttgaacccgggaggtggaggttgcagtgagctaagatcacatcactgcactccagcctgggtaacagagtgagactgtctcaaaaaaaaaaaagaaaaagaaaaaggatgatgtgcctcagaaaagcagcacaccagcccctgcttaagaagacagctcttggaagttcctccacgcctctctcgaggcaggtagggctctgctccttctgggcctcatcctgctttttctgcaaatcctaggaatctcttgctctgtattgtgacttgaggctgagataacatttcttcccaaatctgagaagagagatagattacgggagaatgccgcctttctggaaatcactaggacatgttttttcagaagtagctaacttagaaaagaccacattggtgaccagggccaggacccctgccttttgacctggcctgtcccaggagccacggatcccttagatttgcatctgccatacccgtgaacatcttgggcccctcatataaccaaggaagggatctccagaacatccaagcaaaggaagacaaagcaaagggttttgataacagctgaaagtattacccacttgagattgacttgaatttgtgtgtcggaagctggctaatgctgtcacatggtatttgacttttaccactattttaaaagtgaaagaggttaacaatctccttatcacacacttgataaaaagtggaccaaaggtgctaatttgaggcaatttgcgatcagcttcctagtctttttggtattaaaggaagacaaattttgccatatagtgtttaaaaacaaacaaacaaacaaagacaaaaaaaacccacaagccagggagctacttaatgtcaggcatcggactgagtagatgggagtggttatttttcattatgacacggcgaaaccgatcggggtggttaccacccctctccactaagggacgggcagaagaaatcagagcagacgggggccctccaacaccagggcccctggtggcctctagacctctgccgtccaatcaggtagccaccaaccccgtgtggtcttgaacatggaaatgtggccagtgcagtgaggcaggtgtgacctgcgctctgcatctcaggaccaaaaaaaaaaaaaagaaaatatcccaataattgtttcacacggattccattgagagagtattttggatatgctgcattaacgtgtattacttaacaggcattccacctgtttccctgctttgtaacgcggctcctggaacatttcaggtcgcgtcctgagattggacagcacggcctagactaaggcgggggagggcgacagcgaccccgcgggtgcagcgcgtgggcggccgaggggtggtggctgcgcccggggcttgggggtggggtggctgcggccgcgccccttgctgccctctaacgtgtcgcctgtccccgcagcgcccgccgccgccgtgcgcaggttcggcgaggacaccgcgcccccgagcttcccgagctgcggccactaccgcgaggagcccgcgctgggcccggccaaagccgcccgccaggccgcccgggacggggcgcggctggcgctggcccgcgcggcacccgagtgctgcgcgcccccgacccccgaggccccgggcgcgccggcgcagctgcccttcgtgctgctcaactaccaccgcgtgctggcccggcgcggaccgctggggggcgccgcacccgccgcctccggcctggcctgcgctcccggcggccccgaggcggcgaccggcgcgctgcggctccggcacccgagccccgccgccacctccccgcccggcgcgcccctgccgcactacctgggcgcctcggtcatcatcaccaacgggaggtgacccgctggccgcccgcgccaggagcctggacccggcctcccggggctgcggcgccaccgagcccggcaaatgcgcacgacctacattaatttatgcagagacagctgtttgaattggaccccgccgccgacttgcggatttccaccgcggaggccccgcgcgccggtgccgagggccgaggagcgcccgggtccgggcaggtgaccgcccgcctctgtcctgcgagggccggtgcgacccagttgctgggggcttggtttcctcaccttgaaatcgggcttcacgcgtcttgccttgtccccaacgttccacaacagtcccgctgggggattgaagcggtttcactccgcaaatatcctccactttcaggagggaaaacccaccctaccacagtccgctcttccaagtggacggcagacctgggaggggacgcctgtgtcacgagcccttttagatgcttaggtgaaggcagaagtgatgattgtaagtcccatgaatacacaactccactgtctttaaaagtcattcaagagtctcattatttttgtttttatttaaccctttcttcaatacaaaaagccaacaaaccaagactaagggggtgaccatgcaattccattttgtgtctgtgaacataggtgtgcttcccaaatacattaacaagctcttacttccccctaacccctatgaactcttgataacaccaagagtagcaccttcagaatatattgaataggcattaaatgcaaaaatatatatgtagccagacagtttatgagaatgaccctgtcaagcttcattattacgtggcaaaatccctctggcccacacagatctgtaattcactaggctcgtgtttgctacaaatagtgctaataaagttaaattgcacgtgcaatacggaacactgtcaatggactgcaccttgtgaaggaaaaacatgcttaagggggtgtaatgaaaatgatgtagacattttaagcattttctacacagcgagaaaacttcgtaagaacatgttacgtgtgcaacaggtaaacagaaatcctttcataaagcaccagcagtgtttaaaaaatgagcttccattaatttttactttttatgggttttgcttaaagatctcaacatggaaaaatcctgtcatggctctgaactgcacaatgcattgaaccgccgtccttcaattttcttcacactatcaacactgcagcattttgctgctttatcaaaatggtttattttaggaaactttttccacctttctgaatggaaagaggttttcacaaatgttttaaactcatcgttctaaaatcaagtgcacctacaccaactgctctcaaaatgtgaactgacttttttttttttttttttgccaaccctgtgtcacttagtgaggacctgacacaatccctacagggtgtctgtcagtgggcctcatggtaagagtcacaatttgcaaatttaggaccgtgggtcatgcagcgaaggggctggatggtaggaagggatgtgcccgcctctccacgcactcagctatacctcattcacagctccttgtgagtgtgtgcacaggaaataagccgagggtattatttttttatgttcatgagtcttgtaattaaaccgtgattcttgaaaggtgtaggtttgattactaggagataccaccgacatttttcaataaagtactgcaaaatgcttttgtgtctaccttgttattaacttttggggctgtatttagtaaaaataaatcaaggctatcggagcagttcaataacaaaggttactgttgagaaaaaagaccctatcatagatttacaagtgacaacgtggacaggcgtaacagagtgtgtatgtacttgaaaatgtgtactagtgaaaacgtccttgtctaaacaaacttcgttttcataacctagaacatgaaggaagattcttacacgagctggcttcaggacggccagggctgagtgtgaagtcagcagagctgttactgtggcaacctaatattgtgacctccatcttgaagagtctgcacatttaagctggggatagcgtttcttgacttctgtgaggctccggcaggggaagaggaagcattttaatacatatgcctctcttttacaaaaaagaaaaaaaaatcatcgtaggccctaacatgtaccatgttgacaaaaatgccagatcaaatggatttgagaaataagcccaattcaaggctggctcagccctccacggggcctcccagggaaaggaattcctttatgttcttggaagcccttttctagaaaagccattccattcatacctttgtagagcagtgggctgggtgtggagggcagcgcggagggtatctgcaagagcctgtattttccgcctcccttgcccccactccttttatccttttaaaagtcctatcagccctgccttcgtcccttccgccctaagccctaagagtgggggaggtttaatacggccaatggatcttgtataaagtctacgtaagttttaatttaccagagctataagatggttaaggtagactagtggggactgctacagataaaatgagatacaaagaacatttgcaaataaatgccataaaattacagtagcttggaattttagtgaatcatggcccttgtgttatctagaatgctaattattcaagctgttcctaaacttaagtatgacatataagattaaaatcttggggggaaaaactgttcagatgaaaagtcaagtcaagaagtttccacaaaagaaaagaaaaatcctaaaaacaatctagctgttgttacattaaatttatttctcacctccattaaaagggtttttgctttggagttttgttaactttcgttctttggagtaataatatttctcttgtgtatggcgctgaatacatttgtcaataatacgtcaaaaaaaaaaacacttggcttcttaatacttggaaatacgtacatattccttactatgtaaaacactttatttattttgtaaaaatgtttaaatatgaataaaaatactgtaacccaaagtagttgcctacttttaaaaatgaaacttgtaaaaataagagggagcccaaaccacatagaaagtcttagtttattttggtagacttgctttttataggcattggtttaaagtgattcttttcagagacatcctttgagaagttaaaattgcagaggcttacgctttcttttatttcaaatatgcatagtgattaaccaggaataaggattctcccatgttctgcctgttaagagcaaacagatctggagaacggaagcccaccctgcctcccttttccatctgaagcagtgcggggaggctggctcctctctttgttcccagactccagggcaaggggcgaccatgctgtatatgctgtgccttgggggacccccagaggctgcgctctgtggcctgtgctcccccgacctgtgcacccgcaccccagtcggccacttgctctcacatcaggcaacgtcagcctgctgcagtgaaactcaaccacgattttcctttgcacacaaatccttcctacttccaccactccctagcagagttcccagtgccagagagcactgctggggtggggg

SEQ ID NO: 548 - DNA, 84518 bp, Homo sapiens
  source 1..84518: mol_type = genomic DNA
gggcgccgcccctcccaggcccgaagcccccggcccgcgcagcagggacactccgccaggggccggcgggcggggcggggccggcgcggccgggagccgcggacactcggccaccgagccaccggccacggcgcagcgggggccgccgggctgcgccgccagggtcacgcgacgcggtgcccgtctcggcgcagggtccctgggcgtggccgctgtccccctcgtgtgtgggaccccaggtcaccgtgtggcgtcccggtagtgtgtgggaccccagaggcgtccggggcctccccgctgtgtggtgtcccaccctgggagaaccccgggtgcgtggcgtggccccccggccgcccccagctggtttgcggtcgtggcgggggcctgtgggtttctgggccccgacggcggcgagacgggcgccttcccagcggcgcaggaagcggcctcggccggaaggggggccccgggcgccaccgccgcctccgcctccgcccgcgcccagcggccctcggcgggcggggccgagcggggccgagcggagtcgagcatggccgagcgtagccgagtcccggccgagcggagccgagtcatggcagggcgggtccgagcgtggccgagtcccgggcgagcggagccgagcgcggccgagtccgggcggggagcgcgcgttcctggaagagcccggctggggagcgggtcacattcttggccagcgctagggctgaggcggacgcacggcaacaaacagcgcggggggcggggccggcgcggggcggagcgggcggcgcggggcggggcggcgcggcggcggcgtgagctcagcgccgggcgctcagtccgagccggagcgagccgccgggaggatgtgcgccgagcgccccgagccccgcgccgccgccgcgctctgagggccgcgggcgagaggcgcctccgccgccccggaagccgggcgggcgggccgcggagccggcgggcgggcgggccgggggccggcggcgggcgcgacgcggccggccagcgccgccgggacgagccgggcgggcgcctcgcggtgggaggagcggggcggcggcggcgcgccgcgcgaggacggcccggcgggccccgcgcccgcgcccccgctcctcccgggcccctcggcctcggccgccgcggcgattcgcgcctcgcggcgccggcacctgcccgcgcgccccccgcgagccccgggcccgcgagcgttggcgttggcgttggcggcgcgcgccggggcatgccccgcgcctagagcccggggggcgcgcgggggacgcgcggggggcccgggcggcggcgggcgcggcgcggggcgcgtggatgtggcgccgggcccgggcggcggcgggctccagcggcgggaccccttcgccccgcccgccttccccttcgcgcccccgggcgaggccgcggccgtgatcggccgtgagccggcggcggggggcggccggggtcggggccgcgggcgccgccggggcgcgcggggcggcggcgggggccgggggggcccgggcgcgcgggagcgggagcggccgggggagccggagcgcaccatggaggcggcggcaggcggccgcggctgtttccagccgcacccggggctgcagaagacgctggagcagttccacctgagctccatgagctcgctgggcggcccggccgctttctcggcgcgctgggcgcaggaggcctacaagaaggagagcgccaaggaggcgggcgcggccgcggtgccggcgccggtgcccgcagccaccgagccgccgcccgtgctgcacctgcccgccatccagccgccgccgcccgtgctgcccgggcccttcttcatgccgtccgaccgctccaccgagcgctgcgagaccgtactggaaggcgagaccatctcgtgcttcgtggtgggaggcgagaagcgcctgtgtctgccgcagattctcaactcggtgctgcgcgacttctcgctgcagcagatcaacgcggtgtgcgacgagctccacatctactgctcgcgctgcacggccgaccagctggagatcctcaaagtcatgggcatcctgcccttctcggcgccctcgtgcgggctcatcaccaagacggacgccgagcgcctgtgcaacgcgctgctctacggcggcgcctacccgccgccctgcaagaaggagctggccgccagcctggcgctgggcctggagctcagcgagcgcagcgtccgcgtgtaccacgagtgcttcggcaagtgtaaggggctgctggtgcccgagctctacagcagcccgagcgccgcctgcatccagtgcctggactgccgcctcatgtacccgccgcacaagttcgtggtgcactcgcacaaggccctggagaaccggacctgccactggggcttcgactcggccaactggcgggcctacatcctgctgagccaggattacacgggcaaggaggagcaggcgcgcctcggccgctgcctggacgacgtgaaggagaaattcgactatggcaacaagtacaagcggcgggtgccccgggtgagtggccccaggcctgggagctggggaggatgcgcttggggtgggggccccttctggactacaggctctggtctccgaaggctgggacctgtgcttctgccgtgccccatgtctccagtcttcgctttgttttagggaaattcagagtgttccgactggcagggccagagagtttggtaggaaggccctcctgcccgttccccaggacgagcctggagtgcgggctgtggcggtggggtggggggccaggcctggtgtgtggggaaggcccgcaggcccacaggcattgcccagataggaaggcacaggcctcatgctcccgagaaagcggcctgccccaggtcagggaagttaggtccagctgggccacggcccggatgcctcaggcccaggtctttcttggggttggggtgaaggtggctgtcctcgccccgaaggcacccagcctcgaagacggagggctgcctgcctttgggccccaggagacagagcttgggtgaggcgaggcctggttttgttactggctcccgctccctgtttggtgccttgaagttttgggacacagacacaaaatgaagccaggtgtccaggcttcagtggcaggggcccgagacttggcggctccagcactgtgctggttggtctccctgggcctgccagggaccaaatcccagagtccgccgtgtggggtgagggccatttggcacccggctgaggggcctggtcagcaggctcctgggcccgcgtgctggagttactggcggcctgcgatttgctttggactcacccatttccttctctccctctgaaacgcagaggggtgcgccggagagggaggctgctggcctggctttgttgtttgccagttggaggatctatgggatccggcatgggcagctcccaggccacgaggtgccgaaattactcagtggggtcctcaggaactttccgttgcgtacctccccaagtatttgtaacttttcttttaaatatccaggcttattaaattgcacacacagaatgctgcattggctcagctattcttgggaggcctaattaattcagctattgcatcaaactttttttttctaaatctgtgaatagatgctccagcccggttttctctgggcgcccctccagcagagtgtcagatcgtggggaggaggggctgtggatggaagcgagggactgtcgcctctgctcggagggggctgcggagggtgcatgtgtgtgtgcatgtgtgtgtttgtgtgtgcgcgcttctgaccctgccaggccagggctcaggtggcagccgcctgcagacctgtgggctggggaaggatgctcgtggcagagctgcagacagacgtagcaggctggggcccttcgtgtcacacggggagttggttggggtgggcccgatggcgctccctgtgggctggggcctttctttttggggtggccgcaccctcgtcagtgcctgtggctggaggaagccacatgtcgggggggattgtgggctcgtgcaggctgcgtagtgggtcacctgtggccaaggcctgagctgctgggacacgctcacgtcactgtcttcagagctgatggcagaggatctcggttgagcagggtgtgtctgcgtttgtttttgtccgactgtgggtcatgtgtgtgcttgtggtctttctgtcttcctgggctttgctgggggcccattggagtggccagtggggcctcgttgtcacagctgacacagagcagggcccaggccacccggcttctctctccctgtggttgtgagcgccggggtccttgggccgccatagagacaggccagacaggctctggtcatctcagcggatgcctccgagccgcctttcccttttgaagtccccagcactgctctgaaatttcatttaccgattaaaaagcaattcccaggccatactgacgacgtgcacggtgtgagtgactgcgtcctctaggcctgagtggcagccacacagcctggccctggcagtggtgtcctccgcctggctccctgaatgttcaccagctcctgcgggttttcctctcctcatgctcctgggggtggggcacccatcctgcccgtgttgcctcctgctctatgttcttgacgtgggatggcggccagggactctgccctcgctcagtgcctgccctttaggctctgtgactgtgcacttgggagttctgggcttcagggtccccttaagtctcctcaggacagccgtgtgcgtgtctctgtgtgcacaggagcgacacatgagaagggagtgtggtctcagggtgggcgtggacccacagtgcccagaccctacttgtcctagaaggagtggcctgggaggccccgcctccgccctcactggccgccgttggctcctcccactcgtgtcttgacagcttattctcgggatatgttttgatttcttcacttcctttgtagcttattttaatatttttgatctgccgaagatgagggcagaacaaagaatgtactggaactctctttgcagggctgctgctcccagcaggccttcgggctctgcggagccggagggggctgaattgccttccgggtgtttgtggccaggccagggtcgggtctcctgcctgagtgggctgggtcagcgccactctcctacccatggtgggaggtgggagagggcggagatgttcccgggtcccaaaccaagtgggaggcagggctgcagctttctccttggaagcctcctgtgacagcggctgtgcctgagcctctggcctgtcggcagtgcagtggcagcatgaggggcagacagtcttcctccagatgccccctcatgtcacggggttacagaggaagcctccgcttctgtccagtggctgtcgggcccggccagcttcctgctgctgtatcttggaagaccatgtgggctgcatgggtgcttggcgagtctcctcttagggaccctggggctgctatccttgacaggggaccttgtctcacctccccactcggtcccacactggctttgtgaccttggacgagttgcttaacctctctgcctcagtgtaaactggggactactgtttattgatcttggactttatgttttgagtggtacaggtggggcacagatgggtcattgtgctgctgggagcacttagccaagactggagcctctgagccttccccactcccacccctctttcttctttccggtcggctcgcctccttcctcgggttctctgatagctgtaggactccattggactacatttttttgtcagtatagacagctgtcagagacggagacaaaatgtggcagttggagctgccgcttggcctgctgcctgggacgcggccccttgtcccgcagaacgtcagccaagcgctttccgtgcaggctgataacagggtggtgccgtgcttcccttgggccgtggcaggatcctgctccaagggggggtcctgctccgagggggccggggtttctgttccaacagggctggtggggggggtcctgttcccagaggtccgggatcctgttctgagggggccagggtcctgttctgggccgggggtcctgctccgagggggccgggcgtcctgttcctaggggcggtgggctgcctgtgtgagagctgttcttcacctgccacgtgcagtctgggcattctggtgactggagaatttgggttgtgttacagtgttgttgctctgtcctgcagatgcctgaattcccaggggtcttgcaggtccccttgcccttgcgctgtgtgggctggcgtgggtctcagtgggctgtgggttgagggtcgcttggttgggaagctctgcgcgcttcccagtggagggtccgcgacgggggttttctgatccctcatgctggcttttgacccgtgtcactgcaaggctgcccctggccccaggcagcgtttcttcaggcaggtgcccagccaggtggtcgggcttgagacctttgagtctcgaggtctgttctggggaatgactgagcttgtggaggccaggaaggggttgctgggcttggagagcctctggggaggagttgtgttttgctctttgctgttttaagctgaaatgatcacaggaagggacagcatcaagagtttctttctgggacacccctcactcagctcagcggccgtgtgtgggtttggggctgtgctctcccagacaccctcaggtccggggagcacttcgggggctatctgtccctttgtccaccagcttcctttggaaaaagtgtttgctgcaagtgtttttctccagcttttcgtggggttccctgtagtcttgggccatgctctggggtcaggctcccggcaggccctggtccccgtgcagaaggccagggtctgcgggtttgggctggtctgccccccaggtgagggttccggaaagacggccggctgctgagtcttctcaagcaggggaaacagcagctcgagagtggttcttgacctctgcccaccccagctggctgtgcacggactggggagggcatgggcagctgcccccaggtggcttctgcagggagcagagcttagtggtcattttcccggcatggtctgtcatccgtctgtctgggacccctctgggagctgggctgggtccctcgccttctggggcagcagggtcacggtgggggggctagtcctctctttcagcatcttgtttctcagccgtccctgcggctatttgtgcaatgtctgtctgtctgagtctccgggtgagggcagacaggatatggtgcgaggaagtctggggtaagtgtgagccgaaccccgccctggagtctctcggggttgtggggccacagccccagcttaggttaggccttcactgctgctggcagggcctccagagagaaggcggtggttccggggcctgggccctgactgtctggcaggaggtgtccacgccggcggcccggctctctgtggcaataatgtgtctctttctaaggattgcgaaagttgagggaggatttctccactggaagaattatgcaagcttcaactgaaatgtttttaaaaagtttctttgttttgagtcaaaatacagaaggtgaattatttccctaatatctgggagagctggaaaagaaggcccctgtccttattcttcagggctcttcccctcctgagcagtggtcaccaggccagggtgtcatggagggggggctgcctggggaccagctctttacacctggcctccagagcgggtggtagggcggctccttcctgccctgccctggctgtcaccctcgtggtctggagcagggtttttttttgttgttatttttttttttttttgagacagggtctgtttctgttgcccaggctggagtgcagtggtgcgatcttggctcactgcagcctccgtctcctgggttcaagcgattctcctgccccagcctcctggtagctgggattacagatgtgtgccaccacacccaagtaatttttttgtatttttagtagagatggggtttcaccatgttggccagcctggtctcgaactcctgacctcaagttatctgcccaccttggcctcccagagtgctgggattacaggcataagccactgtgcctggcccctggagtgggttctgccacggaaggcatccccggggtctgcgggctggaggggtcgcccccactgtgccacctgttctctcgaggcctggttgccctctgcagaccaggtgccatgccaggtgaccctcaggaagctctggctcaccccgggggctggggggcatgataagcgatagctcttaggtgctgctgctttgtgaatatgagagagttccagaagggccccgcttcccagagcctgcatgttggtttcactgtgtggtacttgatatttttccaggctgccttgctggggtggcctcgatggggggcccagggagcctccagctctggggacatgctgccacatgagcctgcttatttacgaaaatgaagaaccaggacttgagtgtgaattttaaatgagattgtggggacaatagtaaaatccagactaggaccagatggactgagcacctgcgttggccatggcccggaggtggcgtggtggtgcctggcgcctgtggccctcagcatgtgtcctgccggccgcctagtaggccttcgcttgaagtgcttattcctttgagtaatgctcctgtcttttgtttggggggaaacagataaagggggctttgagaggcgtctcggcgtgatcctgggaaacggccgagattctgttcggtgcttggtgttcgtgtcttctctgattttacctttttgactcataaagatggaaggagtgctctgcctcggtgcctctgcagctgcagatgctgaatcggggcgtttaggcctgcctcttgggctggcacacctggcggccttggtcaggccttcttgggctgcctctgctggggtgcttgtctcactggccgtgggggttgttgcctgtgtggttgtgttgctggcttcaggggctagggttagggacgcctggtcacgtctgggtccccagtttgggggccagattcaataactcactgaatgactcagtggaactctgcaggcactggcagtcaaggtttattggcaggtccattctttggctagaaggagaatgctgtttcttttctcactgtttcaccatttttttttttgagatggagtcttgctctgttgcccaggctggagtgcagtggcgtgatctcggctcactgcaacctcagcctcccgggttcaagcaattcccctgcctcagcctcctgagcagctgggactacaggtgcgtgccaccacgcctggctaattttttgtattttagtagagacggggttttaccatgttggccaggatggtctccatctcctgacctcttgatctgcccacctcggcctcccaaagtgttgggattacaggcatgagccattgcgcctggccattgttccacctttggaagaaattggttcaccgtcttctgacctggggggcgcttctaccctggttccatattgagggctgggaagttgctggaatattattacccttggctggtgaggctgagtgctgatgctcctcccagctctcagccctgcctggaccaactgcggcttctgctggaacgtcggcggctgacttagaaagaaacagctcctgttctaggcttcctgcaggtcccacggtgctgcttgtttcagagaaacgcagctcaggctggcggcctcaggtgggcatgggtggcaggggatgccatcacccaaatcagggatctttctctgtcctgagggttccaccccaggacccagggcactaactgggttcttgtgtggcccttcccgaccagacctgacccctgagctgcgtgtgtgaggtgatggtgactccacgacagcttgtgtgccgttatgggggcacctgaggactggctgacctcaccgggaagtgcgtcaggagtgggtgaggggtggtgggagggcagggagcgcccagcaggtgtccagcggtgctggcgctgcctctgtctctctgtccacgccctgtgtgtatctggagtggcttaggtgctccctgcggtgctcctggctgctgtggttcctgaaggctgcggctgtgccggtggtttcctttgatgtcagtcttcttctacaggggaaaccatgttgccaggagagccaggtgtccgctaattacgttgtgttgttctgcccaggagtgaacctgtaagtgatgagaataagaagcggctgtcagcctgcagacccgccctcaccctgtcctggttggggtgctgcctgctgggaacccctggtccagctgttgagaggaggctgactgggggcacagttgttgcagagtctgatgcaggctttctctgccgggaaagtaacatggaaacattgttgcttttactatggagcagatgtatctttgcccagaaacagaaatgctcttggtttctttttttggaaataaggcccataggctgggtccttcttgccctgttgagggaacgtgtctgtccttagcgtggaggccagtctggccgggtgctgagctcgtcctgcagaacacgcgtgaacgcctcatccctgagggccccgggaggctggcgccctctgtgggaggtctgaggttggcccatttgaccctatccaggacgggttacttaaggagtccaacgggccttgagaggctgatcaccctcgtgtggcgggcgtctctccccggtgccctcccgcctggtgctgtcaagggcttctctgtgccaggcgctgggctgtggcagccccaggtccccgcctggtgtggctgcccacggtccaggcagctccagggtgggcatccttggctccctccctcaccagctggccctgggaggtctgtctgagaggagttaggcctcattgtccgtgctcagagaacccgagccttccttaggaagcagtttgtccccgtgcctcccttcaggatcctgtggcctgagaagcctctgcgtggcagtggatggcagctccagctgcccgtggccctctttttttatggtttcccagatgactgggccaagctgggcctctgcatcctaggcatgctgttccctgcgcttccctggaaggtcggcggccctgcgtggacctacacggtacccaggacaggcctgccatggcaccggttgggcctctgggcacagggtgctctgcctccatggccctgacaggctctgatgcctgaggatgggggccgggcactcccagccttgagacttccctctgcagaggtggcacaagcccggggccccagagtgaggggactcttgcctgcctggtgagggtgagcgtggggtctggactctgacccctggtccaggcgggagaggagcacactggacagggcagccgagccaccctctgcggagctgtggacactgcgtgtgtggtgctgaaggtgtacacgtccactgaggccacctgcgccgctgcctgtgtcctgtgggctggcactcaccgagtgagagctgtgtgcagaacctccgctgtcagcgggccaggccacactggggagggaggtattccgtgtgcttgcactgaagcctgccccaggctgccttctgggttagggatacccaggacctccatagctggtgtggcgtctgtgagatctcagctgctgcttccctggacgcccgtgtggacctggaggggggtggggacccggcctggcatggtccctggccacctgcctggtgctccgggttgtgccgttggcagtgccttcgctctgcctcacctgctgcctccgcctttcctggctacaaccctgttgcccaaaccattaaaaaaattatactaccaagttgaatgatatgcaaatgtagtcaattaagcgaggggattttaattagcagtttaagttcatgtgtgaagtgccttgccttaattacttgacagttttgttgtaaatttgctaagtttttttttgcagaactatcaaaactgtgatttttgttaacattcttggatgcggtgagtggcgcccagcttgcctgaccctagtgggttttgtcttaatttataaagctctttaaactgtgaaaacaaggtaaaccccctgggttgcctctgtgtggctcttcgagtcaagccgggctcgatgtcttccttgtcactggctggggtggggacctgcctcgtgcgtggtcttgagctcccgttgggggaacgggagaaccttcatcccatgtgggtgtagccgttggcggcacctttgtacggggacacaccctggacctgaatggagtcaggaagggtttcaacctggatggcccgcgtgccggggacccgcaaggtgtgcagtggcaagggccggtcctggtggcgggctccctggtgatgctggtggatggttgtgcgtgggccttggggttcacagttcagtttgggagaggcgagaacccctcactttgaagtctttcctggccaacgggaggcttctcagagcagctttcacggctccggggctgagtgaggcctgtgtctaggctcatcctgccctccggggcgtcccagtgtgcctgggcagtggcgcagctggctccttccactgggtttaggtgtgcttctgctccccactgctgcttcagctgcgtcctttgcgggtccccgtaacttcagtgcccccacccctgttcggttccctgactgagctcggcgcctctagtgtagatgggtttttaattttcccagctgaacgtcgttatttggattgtgatttctttggtgtttcaatggactgtagatgaaggaggacctgttttctctcaggagtgtctgtggggtctcttgtcctggtttgctcagtgaagtgtggccccaagggctgagggaggtggccaggaccccgcagggtggcccccaccacagaggctgctgtcctccgggttcttctccactttctgggaccttggccgaggaggcctctgggagggtgaaatggccacaggcctggagaagcgacaccggtgggaagccaccggcagagaagtcagggaggagggagtcctgggcctggaggaacgtgggaggggcaggcgcctcctagcagcctcaagaaatgtgggccaggcaggtctggctacgggcaggagtgtgtctgggactctgaactgccagaagcacttggcggcaagccacatgctgtcacaatgttgcctggcccccatgaggaggtcccgtgggtggtggcgggtggtggctggttgtggggcaaggctgcgggactgggaccgctggcttcctggggccatcgaggctcccagaagaagaaatcaagaggattttaagaagcagagttctctttagcccgaagtaaccatacagcattaacaagaaaacttggaattcttcgaagtgaagctctctctacttgttcggaggatggaggacagttctagatccaggagagcggtggcgcagacacggacttcacccttggtgggaggggagaagcacagcatcctgttgttcgtgagtcaggtgagaggcgcgagaaaccacagctcttaggaaaatccgtgctgcccagtgtgggggccgtccacagcccttcggcactgctggggaagtggccctgcgtcgaccccaatcctcctcagctgtgttcagcccctgagatgccctgggctccctggttgagctttggtgggtaactgcaggatgcacacaggagctgcaggcgagggctttgtaggagctctgtggccgccccacatccctggcctctgccattttctgcctaaacgttgacacatggaagagggagcccaggatgctgtgggcccagaaggtggggccctgcgggctccatcacttcactccagggcacagagggcccagggtcccctcacacttgcctgtggggaccagtgggaacaattctcattttactgtcattatgaacttgcggcttaaatatgtctgtggacttcaaagtgccatcctgtgtggaaaatttccagctttcactgaagtagagagattagctcaatgcaccccatgtatcccgttcaccagttatccacagctcactcattttgtttcatccaactccctctcctattttgagggggagggattgtaattttttttttctttgagactgagtcctgctctgtcgcccaggctatagtgcagtgctgcgatctccgctcactgcaagctctgtctcccgggttcacgccattctcctgcctcagcctcccgagtagctgggactacaggtgcccgccaccgtgcccggctaatttttttgtgtttttagtagagacggggttttaccgttttagccaggatggtctcgatctcctgacctcgcgatccgcccgcctcggcctcccaaagtgctaggattacaggtgtgagccactgcgcccggccaggactgtaattttttgaagcaaatcccaggcatcatcttatttcatatttaagtgtttcaatatccacatctaaggaatatggaatcataaaaaacgctcaccatgacccattaccttgcctaacaaagctgagggcaatttccggacaccagcccatgttcaggtccttcctgtctcagaagtgttttcctgctgcttttcgggacccagggacagcactgcgtgcgatggatgggtcttccgtgcatgcctgtctgtgtgtgtgtgtgtgtgtgtgcctgtgtgtgcctgtgtgtacgtgtgtggtgctgtgatgggctgtggggacagtcccgcgtgctgacctgagcctggcagagtcaatatcttgttgggaggcagcaggccaggagagagcggagctggttggaggagggccagcctccccacctagagaccgtcggtgaccttcctcatgtgatgcgtcccttggtgtggcccccagccgctagtggtgaacctctgtaaatgtatgtgaacacttcccgtgcatgtctagtcaggagagtaatcagagaagcaattggtatgtgctcatcaaagaaccccagaacagccgagaagagtgcagagggtaaccccttctctgtctttgttcttggtgggttgggggagaagtacagtgtcctgtttgttcacgtcaggggagaggcaggaatgtaccacatctctgtcgctggaaacgtgggaagccgggatgtggcctaccgtggccccttctggccccgcaggggagtgggtgtccctgccctcactgtaatctctaccacattgatggaaagatttttctttttcttatttttggagacaaggtctcgctctgtcatctgtgttggagtgcagtggtgtgatcccagctcactgcagctttgacatcttgggctcaagagattctcccgcctcagcttcctgagtagccgggactgtaggtgggcatcaccacgcctggcggatattttttttaattttagagatgtgatctccgtttgttacccagactggtctgaaactcctgggctcaagtgatcctcctgcctcagcctcccaaagtgctgtgagccaccactcctggcctgaaagtatttttcgtaattggatttttccatatgtgcactaaggtctgcctttttccctgaatgaggcataacaagtatttctgtggctgtgttctctgtgggaatattattgtgacatgcttgtaagaagtaagtgaaaagcacaccagcacggtattcacatagcacagaaggttataaaaggcaaacgcagacatgggtgagggcagagttgttcttggtttgtcacaagggcgtgtgaacgcggttccccacctgccctgctctgctcagcagctttgggatatgagtgccttgggtgcctggtgcctttttgggccagccctgtggtattttggagtatccgttggtattgagagtctggaacttacttagtgtctggggcatgggccgtgttttggtatcgcaagagatgcttcagggcgcgtgtcagcacaaacacatcacacgggcttcgtgaccatgtgctggctgcacgagatgtcagtgtgctccgcgtaccacctgcttcatccccgccctgccctctcgtgctcctcggcagggggccgccatccttatgccccgcctgccctttctgcagctgtgggtgcaggctggccgttgtgctctgttgcaggagctcctgtcaggctgctggtctgcgcgtgtgctctccgagtgcctgtcactctggctgactcactgtgtcagtgtcaccgtgcagctttgctcgtcctgttcttgtgccttgggacgagtgggcagagtgcttgctgttgggtaggctgtggtgcaccatgtgggcctgggagtgaaacagcttggtcagagggcatgtcggtcacgccaggctgtcttccaaagcgtcccaacactccctgtcatcggtcttgttggctgtaaacgagttctctgctgcatgggatgctaggggtgtggtgagtttcttgtagacgtggcaggtcagaggggaggcacactgtctgccaggcaccctgttatttactgatacacgcacacgcaatacacatctctatagattgcttttgtatgttcactcagctgggatgattctgtgtgtgcttagatctttgttcacgtttctgatcatttccttagtggactctgagattcccctaaaaggtgggattgttttacccaaacttttctttctttctttctttctttttttgacacagagtctcgctctgtcacccaggctggagtgcaatggcatgatctcggctcattgcaagctccgcctcccgggttcatcccattctcctgcctcagtctcctgagtagctgggtctacaggtgcccgccaccacacccggataattttttgtatttttagtagagatggggtttcaccgtgttagccaggatggtctcatctcctgacctcgtgatccgcctgcctcggcctcccaaagtgctgggattacaggcgtgagccactgcacctggcccctcctgacaacttttaagattctgtcatttaggctgggcatggtggctcacacctgtaatcccagcactttgggaggccaaggtgggtggatcacttgaggtcaggttttcaagaccagcctggccaacatggtgacaccatgtttctactagaaaaatacaaaaattacctgggcgtggtggtgtgcacctgtagtcccagctacttgggaggctgaggctggagaatagcttgaacctgggaggtgaaggttgcagtgagctgagatggcgccattgtactacagcctgggtgacagagcgagactctgtctcaaaaaacgaaaagcaaaaacaagattctgtcatttagagtgtctttgttaatttgaaaggtgaaaaatctcatcatttagtttgtatttctttgctttttggtgggttgattgttttgttatttcagtatttttttctgtaacttgtgcatattacattttcttattgtggcaaaataaacataatgttgaccattacatgtagcattcagcagtgttgaacacataggctgacagtgaaggaatggaaaaagacatcccatgccattggtgaccaaaagaaaacaggagtggctccatttgtatcaaacaaaatatacttttcttcagaaactattactagaaacagaaaagtagttacagaacaataaaagggtcgaatcaactggaagatctaacaataatatatacgcacctaacctcagaacagctaaaactgtaaagcaaattcacgctgctgttcacccaccttcccaggctcagcctttgtccccatgagacactcactccccattctgcctcccccagcccccaacacccacccgccgctttctgtttctgtgactttggtgactctaggggcctcctgtgagtggaatcgcacaggatctgtccttttgtgacagcttatttcactcagcaccatgtcctcaaggcgcagccatgcgtagcctgtgtcacagtctccttccttctcaagactgaaccgcaggctgctgtatggatgtattttgtttacccatttctgtcagtggacacacgggtgacttccacagtttagctgtcgtgaatgatgctgctgtgagcacgggtgcacagtgacctctggagaccctgccttcagttctgggtgtagacccagaagtgggattgctggatcattgatcattctatttttattcatttatttttgagacagcatcttgctctgttgcccaggctggagtgcagtggcacgatctcggctcactgcagcctccacctcctcctgggctcaagcgattctcctgtctcagcctcccaagtagctgggactaaaggcatgtgccaccatgcccagctgatttttgtatttttagtggagatggggtttcaccatgttggccaggctaatcttgaattcttgaccttatgtgacctgcccgccttggcctcctaaagtgctgggattacaagcgtcagccactgcacctggccctatttttccttcttttttttttttttttttttttttttgaggcagggtctcactctgttgcccaggccagagtgcggtggcacagtctcggctcactgcaacctccgcctcccaggttcaagtgattctcctgcctcagcctcctgagtagctggggctataggtgtgtgccaccacacctggctaatttttgtttttttagtagagacgggtttcgccacgttggccaggctggtctctgactcctggcctcaagccgtcatcccgcctcggcctcccaaagtgctgggattacaggcgtgagccaccgcattcagcccgtttttctttttaaagaaccgactgtttttcatagtggctgcagcattttccactcccagcaacagcgttcgagcagcactgtctttgcatcctctccagcacttgttctgttttttgacagcggccatcctaatgggtgtgaggtggcatctcattgtggttttggttctcatttccctgatgattagtatgttgggcattttttcgtgtgcttattggccactcctatatcctctttgaggaatgtctgagtccctctttgagtcgagttgtgtgtgggggcctttgctcagttgtacgtctttatctactctggttagtgatcctgttctacttgtaaatttctgtctcctgtttgtctactgcgtgcaccgtggtcggatcctgcctctgttgctggaggctgcctctgtcctctgctgtggtggtcaggaagctggagcgtctcggcgccagattcatgtttgtaagaggagacgctctgtgagcctcggtgtgcagcgctgtctgcaagtcagactccccacccctcctttgtgcgagctgggcgggggctctgccgggactggtggtgttcatggagagggcttctgtgtgatgaagagatgacagtgacctgctggggccgaaggctgtgagtgccattgggggagggagtctcagagagtgcggcagtcgggcctgatggggctgctcttctgtgaaggggcacctaccgtgtgcctggcctgtagcagcagcaaagaggaacctgatggggggggcctcaggaacctccacctcgcccactgtggccaggctgcttctgctttctgggaggcctgtgcaagagccatgggcacaggccgggcacggtggctcacgcctgtaatcccagcactttgggaggctgaggccagcggatcacaaggtcaggagttcaagaccagcctggccaatatggtgaaatctcgtctctactaaaaatacaaaagttagccaggtgtggtggcatgcacctggtcccagctacttgggaggctgaggcaggagaatcacttgaacctgggagtcggagtttgcagtgagccgagattgtgccactgcacttcagcctgggcaacagagcaagactccatcttaaaaaaacaaaaaacaaaaaagggagccgtgggcatgtgtgtgcacaggtgtgcatgggtgtgtgcagctggagagggaagggcctgggtcaggggcgccctcagcctggagccagggaagggcagcgagaggaccccagactcccaaatgaccaagggcctgtttgcagcgtgcttctccctcctttcttctggctctgaagttatatcctgccagatcctggagaaagttcttttagcaaaatgatggcttcgctgaagatgatacttgccacctcacagaagcctgtcacgttcctccctttggaacccattgccaaatgtgggtggtgtggtggacccggggcaaggggccattctctggcagcccctagaaatgcctccctggggttggggtgcagccaccaggcaagaagtatgtacccccttgccctggccacttggggtttctgggacaatctgctggcttggccttgactttttcctgaacctaggagcccagggcctgctcctggcatcaggacttgctcttcctctttcctgggccccacaggtgcccttggggagcacacagctgccccagcccgagtccagtctggctctcgggaaggggccttactgctggctgcacaccttggcctccttcccctggatgcgccattgccaacgcagctgggacagcccttggacgcagcgtgcccgccccttttaccagggcatgtgggctgggaccagtttcagccccatgttgacttgtttggctctgctggtggtgacgggggggcgcggtggcggggggccttggtcgcgtcgtgtctgctcttgtgcaccggtgcctcacggagaggctgtggtgagtgcgcggaaggaccctggtgcttttggggactttctggagcagcccacattccttccccagagccctaggggcctggccagctgcctttccaggccctgaggccaccaggttcttggggggagctcctaggttctgctttggcctggctgggtggtgcccacactgccgcgtcccctctccggggctgcccggactcagcctggctggcagccatttccgttacttggtttccaaaggccccatcttggaatcaggagcaggctgtgggactcagggtgggttctgagcttggtgacccgctctgctcttttgtccggctttgtcctaactgttgaatattaatgaggggcgccgcagggtggctctccagtggagggtcctcactttttgttttgcaaataacgctggggcccctgcgccactggggcaatgcaactgtgacggtgctggttggattcaaaaggaagcctggcagtggcggggcctggacaggcagcctttgacctgaggcggggcggcgctctgcgctggttcagaaaagccgtggggcagcctctctggcaggcactggctgtacctgttggttttcctttgcccacagtgaagtgaaagtcactgcagctgggtttgctgtttaactcactgtctttccttctcacgtcttctctgtgcaaatagtggtcagtgtactttttgattatttcagtcaagtggaagtttctaggagcgtagagaggcagcgtggcttagggtttaggagcatggctgggctaccttcctactctgagtgtgggccacgttacttttctaggcctcagtttcccattggcccctctcctgtttggaagaggcagctgggtcccacaagccatctcaggagccgcgtctgggcgctggcacggggactgtgcccacagccagccagcctggtggtcagctgatggattcccgtaggtacttagcaaaatgcctggagtgtgcgaggctgtcaggccagtggcagatgcggtcgagtgctgttgtttcttggtgctgcctggcactgccaccctgatggtcggctctgagttggaggccagctttcatggcagcgttgttggtgggcgtgcagggtgtgtctgacctgggcctgggcatcaggtcccattgtggttgggtccacagggccccttgcctcattcgtggaggtgctgggggaattctacaggctgaggacgtgtgaggctccagggtccagcgtgcaggccggatgttcctagcgttgccggccacgcagacagccgtgccaccaggaggttccctggcaatgggagacaattgtctgctcagttcagccttcagtgccccagggctgttttgagatcaaggctgagggggaccctttcaagtgtctctgcctttggtggtcccgggtggccggctcctcacccatggtgtggtctgagtgggctgaaaccgaccccaggtgattcttattcggaagagatgtttctggaaatgagagcaaggcagtgagtggagagccagctgagagatgcttgactccccacctgctgctgttggggccaaaagcgtggaggagggaagagccagcacagagggctcacggtgtcccctgctccaaccgactcactggccgcggcctcatggggcctccctgtcctgcctcctgctcaacaggccacaggttttgttggattcgtcaattatgacccaggttgttgaactggaattggagatgtttttacagttggagagtttgttacagtcagaacatttcgggttgttggagttcggtgtcttgctgctgttgcagcttgcatcttttggccacagtttttttttttgatacagtgtcactctgtctcccaggctggagtgcagtggtgtgatcttggctcacagcaacctccgcctcctggattcaagtgattctcctgcctcagcctcccgaatagctgggattacaggcgcccgcccaccacgcccggctaatatttgtatttttagtagagacggggtttcaccatgttggccaagctagtctcgaactcctgacctcaagtgatgcagccgccttggcctcccaaagtgctgggattacaggcatgagccatcgcacctggccatggccacctgttttaaggaaaccactcagtgtcttaaaagttaagggtgctcattgccctgctcaacagagagtcccgtgtggtgctgggtagccctcgtgccgctctctggccgtcccagaacccgctgtccgttcccagcgtgtcctcgagtgtggggtggccactgctgcccaggtatgccactgtccatggctgatggaggagcaggaagtggcccatttgcaagcctgctgcctgtccttggtttgggtctttttattttgagaaatctccaaacctacatacagcgaagttgcaggaagaacgtggtgagtccccattccctgagctcagctgctgctggcactggcctcctctcgccacgactgtttttgcaactttttgccggtcatttgagagaatgtttcagtcagtggggtcctccctgctaagcccttcattctgaatttctaaaagtaaggggatgtggtgtgtgaccgtgacacggtgaccaagtctgggaagctggctcccctggccacgctctgccgtgtctgccacgccctcttcagtagtttacttctgcctgggacctgcctggcggctcagctgactcttctcttgggcctgcctcgttgccctaggcagctggctgcgcgttggcagggcccggacgggcaggtgggtagcggcagccccggggggccggtgccctatcagaggcgtgggaggcatcaggagcaagcggcccccatgcttttctcaggggagcctctcccttggtaattaatgagtaatccgccgaggggaactttggaccccaaaagtcccctgtccccatggactttatccgggtgggccaggatccctggtgagtctgcttgtcttagggatggggacgtggggcactgaccgcactcttggccactgctgctgctggagtctcgcctttctcctcccgcctgccttcttgccgtgtagtagcgctgcggaccgtgttcggaaagagtcacttactgtccgttctagtcacagttttgatgcccaagttgaccttctgttggctgcccacaggtctgggtatctgctgatgttcttttatttatttattttttgtagagatggggtctcactctgtggcccaggctggtcgtgaattcctgggcttgagccatcctcccgcctggtgtcccacagtactgggattacaggtgtgaacccccgctccctccccctgccccagcccctgctgaggtcttatttcagagccggcagggttttcccagctctcaagcgccctcacgtcccaccacagtgacgtatggtgtgttcactcctgtcctggtccccaggtcgtgtggggccatcgaggctcatccccagctgcagccgccctcctttccctgtagagccctcgcctgtgtaacggttactgcctctgtgtgggcagcatctgggggggctggcgccgggcagtgggagacctgctccatgtcactggtggaacccaatgtatgtgataggttcacaggtctcagctgtgaaattgtgtttgtacacggtggctttttctagaaaaatgaaccgcaaagtatttctttcctcgtgaatgtcgaccattttctcgagtctggttgttgttggccagtgacacaaacctgcagcttctccccttcttgcttccctccccgccccttggctccgggcacagcgtggctgaaccggcttatctggcctcgtctctggaggcctccccagctgtcatgtccgttgacatttcactgttcctggcagtggctgtgcccagacgcgccgtggcacgtgggagtgatgctggtctttgccagtgctctgcacacctgtggggaggcctctcggggtttcctgccaggtctctgtgcaccccccggtgagagatctgaggaggaggaggaggaaccgagggcaggtagggcgctcttcagatgtggagggttggaatctccagtttaataacaaactttatcctaccttaagttttcaaaagtcttgtaaagaacgggtccattcatttttagctgctccgtgaaaggtgagaaagctgagtagggggctgtgtcccaagaccagggtttgctgtggcctggctcgattgagaatcccctgggccccaggagggtgctgtggctgctgaggaggctgccccacgttctgatcctggtgcagggctgcactcagcctccccagaagcagcttggtcccgggtcccacctggcactaacctctgcagggcccctttatgtcatggtgttttggcctgtggaaggctttcgtccgtctgagctgctgactgagggtctttatttccacactcgagagaaacctggcggcccagcagtcagtgcccgcggagcaggtacagctcagggaagggagcagccccttgctcacggtcctttctggcacagtctgtggccctctggagtacccggccagcgtcctcacagctgtccccaaacgcgtggtatgggttcctccctcagggccagcaccaggctggtgctcagctcttctggaagagccgtcccatggtcccagcgcatccgtggaagagtgaaatattgaacgttacaagaaggaagtgaggccaggcgcggtatctcgtgcctgtaatcccagcacttttggagttggcgatgggcagatcacttgaggtcaggagtttgagaccagcctggatcaaaatggcaaaactccatctctactgaaaatacaaaaattagccgggcgtggttgcaggtgcctgtaatcccagctacttgggaggctgaggcatgagaagagcttgaatccgggaggcagaggttgcagtgagcccaggtcatgccactgtactgcagcctgggtgatggagtgagaccctgtctgaaaaaaaaaaaaaaaatagagttgctaaattggagtaaatatttcataacgcgattcagttcagttgctttagctgctctgtgagtccagcacccgcctgcagcgcagcctcccctgtggagtctggagcacccaggcctacatcacaggctccagagcacccgggccggtatcacgggctccagagcacccaggttggtatcatgggctccagagcacccaggccggtatcacgggctccagcacagcgggcaaaaggtgggaggctccccagactttaggtgtctggagttatccataaagggggcttcctgagttttggtgtatcccttggtttacaacccagggagaagcctggccacttgtgagtgcaggtcgtccttggacacacacttggaggaatcggaaggaacaggacacgcagccttatgttcctgtcagcccttcctgcacatatgccctgtctcagggggctgctggcctctgccagggcctcctcacttttgttcctgaggacatcttcccagcgcgtgtgcacttactaaatgagccacatgcccccagttctgacagctaggaacggtgcgagcagatggaggatggagctggtgctgctgcccacaggggccctgggagtgaggctgcgggtccctcgtgccctggtgcggccctggcttgaggccttggtttgggggtgttgtgccccccctaccagggctgagagcccacagtgacagcagaggggaggtgtgtgcgggggccgggcatcgatgctggacttgctgagggttgctttctggtggtgtgcacacatcttgggccagagtggtgtccccagagtgcctgctgctggaagagaaggctctgggtccttctggatgcccatcctggctgtgtggaccacggcggcaagggccacgtgcctggtcgtcaggccacggatgcttgtccggagctgcctcatgtggctcttgcacagaaggcaccattctagacattccaggtgggctccagtgaccatgaggggctggggttggcactggcgctgctcctctgaggtgttggacccacgtgggagctgcttgttcccctccagacactgattgtgaagaatctggaaggtccacgctagaggaggccacgacctgctggtgcgcctgcaagagtgctggcccaactggtctccatgcgtggtgcccgttggagggggtgggagggctcggctctgctctccccccgtgggtcttcgtgtcacagggtgcttgggggactctgctgcactgagatctccagcgtgacatgtccccgtcccaaacagccctgaaatggcaatgcctcatcctaggattaccgtcccttcccgaaggcttgaggtcctacttagatgtctactggactgctttttattttaatttacttgatactcagtctgggtgcgttgaagacgcggcctctggctgtcagcctgtccttgtgtgcagtgaccggtctacctgtctggccttgtgcctagacttgtggccgtcaccactatctctggggaggggtgaagtggactgggaggtaggagccgaattggagtcttctctttgttcctgaagttatcacagtcttggccagactgtggtcactgcgtgcgtgtgtgtgtgtgtgtgatgcgcagggcatttgctggtggaatagcacgggccattggcatttgcacctgaggcgtgcagcccccctgctgcacacctatggggtccctgcggtcaggtgagctctggggggtttctgagggtggagacagccacaacaacacttctttcctccaaatgcctgtgctgtgcacttgggtgcaggtggcttttaggggacatggctgggcactgccccacagtgtcacctctgtgtcctgtggtgcgtgctgtggactggcaccacaccccacgtgcttgttaggccagtttctctcaggtgtcggtcaccctaccatgcggcctttcttttgtcttttatctttagctaaggagtccatggcataccaaaagctgaatgatgacagccagtgtccccatcctgtcctccccaactttccacaggcagggacgctccccattcttgctgcatagtcttctgttgaccccatgtacctgagtgacccccacgtacctgagtgtgacaagcactatggtgcttgacctcagtccagctgcttagacctgtacctgccacagccccacgtgctgacaccttgcgtcttgagttttgataaatctatcctttggctgattaatatgactgagtggtgtcttctgaccccatttcttatctggaacactgtgtcctgacttcatttcctgtctggagcacactgtcctgacctcatttcctgtctggaacacactgtgtcctgacctcatttcctgcctggagctctctgtgtcctgacctcatttcctgtctgtgccgctctgtcctgacctcattttctgtctgtgccaccctttgtcctgacctcatttcctgtctggaacatgctgtgtcctaactgcatttcctgtctggagctctctctgtcctgacctcatttcctgtctggatctctctatgtcctgacctcatttcctgtctggaacatgctgtatcctgatatcatttcctgtctgtgccactttgtccggacctcattttctgtctggagcactctgtatcctgacctcatttcctgtttgtgccaccctttgtcctgacctcatttcctgtctggaacatgctgtgtccggattgcatttcctctctggagctctctctgtcctgacctcatttcctgtctggagccagtgacctcatttcctgtctgtgtcactctgtcctgacctcatttcctgtctgtgccactctttgtcctgacctcatttcctgtatgcaacacactgtgcccggactgcatttcctgtctggagctctctctgtcctgatctcatttcctgtcaggagcactctgtgtactgacctcatttcctgtctgtgccactcttgtgtcctgacctcttttccagtctgtgccactctgtgtcctgacctcatttcttatctgtgccactctgtgtcctgacctcatttcctgtctggagcactctgtcctgacctcatttcctgtcttgtgtcctgacctcatttcctgtctggagctctctgtgtccttacctcatttcctgtctgtgctgctttctgtcttggagttgcgtgcctgacctcatttcctctccactgtgtgttcctggagttaggcatcatcttggtttttactcccttgcttggttttctcaggatctctggctgctccgtccttgctccagcgttcttctctgccccctccctctgtggtccagaggccgatggccagctggccctcacctgcccgccctgggtatttctgtgctcttcctggtgagggattctaggggttcccctcctgggttcatccttacctgagtagccacagcacactgtgcagttgggtgcctgggaggcacgtgctttgggtgttgcatggctgacctggtaactgggcacccgtgtatggagggctggaacagaacacttgtcggcgctcctcagcgtcttgcctctggtgtccccatggcgaagtcccctgccatctgctttgggctctgacatgtgacctgactgtgcccttcaggagctttcagaacctcctcttagatctggcattcaaaatgtcttgtcagacacctcgaggcggcttgtgtttggccctgtgttgggcgcctattgggcccttgtcaggtttttgttgccaggaggctcgcgccccgatcttcgggatggtgcccgtggcatcttctgctcggtgctccctagggctggacgttggtcctcctggcactggtgctccggttgctgtggtctccctgctgttcccttgtggctcaggattactctctggaggtctccgccttatcatgagcactttctttgttggctacttttagtttcatgatttcattttcgtttctaagatatctatctctttgtaaaagctcccaccttttgtgacttgtggatgctgtatctttctcctgttgctgcagacattaatgatgtttttcttgacagtttgtcctgctggtttcctctgcattcctttggttggtttcagacctcggctttaaaggggcatttccccacattgccaattcttgaccatctggtcacgtcaaggctgacgtgccaatggctgcaagggggagggcacctgggagcccgcggatggctcttatgcagacgtgcgggccagccccgatcctgcttctgcaaggcctcccctcccatggtggcgctttggtgccagagcgcgtcggcgtggctccctagcgtctgcctctgcagctgcttggcccccagccgcctcctcccagctgcctcctgccctatgtgtgcttgagctcgagacaatgcttccttcatccaagagccgggctctcggcgatttttgagaggagaatggggttgaagcgatgttgctcttccgtcttaaaactggatttctttcctcatgcttttgaattattatatcttcttgacatgtttctctggatttgcaaaagatttttatattttatatatttatttatttacttatttatttatttttgaggtggaactttgctcttgttgcccaggctggagtgcaatggtgtgatctgggctcactgcagcctccgcctcctgagttcaagcaattctcctaccttagcctgctgagtagctgggattacaggcatgtgccaccatgcctggctaattttgtagttttagtagagatggggtttctccatgttggttaggttggtctcgaactcccgacctcaggtgatctgcccgcctcagcctcccaaagtgctgggattacaggcttgatccactgtgcccagcctgcacaacattttaagtaaatgttgacattttaagcattgagcaaggaagagtgtgaagaggtactttataaagggaaatatggcaatactgattatttgcgactttaaccagaagtaatctttggacagccagatgttattgtcttggaatgtggtgttttatctagtgacaatgtgtgtgcatgcacacgtggacacacaggattcctggtccttaaacccgtatgttcggtgtctgcagcatagaatggtctcggctggtatgtgtgggaccagctcagatgcccctattctagatgccgaggccgaatcgccccctagggaggatgggacagtggctgtgctgagcgtgctacggcgtcatggaagaacagcagaggcgtttgagaattgtgttttttaaaaagagttgaaacttgtcagtcaggaaatggagtaacaggtttatcaggagtgtcattttccttttttttttttttttctcccatgagtggcttggtcggggaactcatgtttttttttgtttttgtttttgagtcagagtctaggtctgtcacccaggctggagtgctgtgatgtggtcttggctcactgcaacctctgcctcccaggttcaagggattctcctgcctcagcctcctgagtagctgggattataggcgcctgccaccatgcccggctaattttttaatttttagtagagacggggtttgttggtcaggctgatcttgaactcctgaccttgtgagctacccaccttggcctcccaaagtgctgggattacaggcgtgagccaccgtgcctggcgggagctcatgttttatctgaggtggcccagggccccacctgggagcagggtcagcagtgcctggcccttgagtgtttgcctcggggtgtgttccttttaaatcagatcagctcatcacttggccggttttctagaccagcatattcaaacccaaggtttggaatcttgggctggcttctgaaatgacatgctgtgggctccatccccagaattctgggttcccaggtccgaggtagggactgagaatgtgcatctctagcaagttcccagatgacatggtggctcctccggaacccctgcctccttttgtgggtaaagttttacaggtgcatggccacgccccaccgccctcgccggtgctgtctgtggctgttttgtgccacagcagaaaggctgagtaggtgcgagagagaccatgtggcctacaaacccaaaatatgtgtgatttggtcccttacggaaaacacttgcaggttcctgatctagagaaagaataattgtaacgcagggctacattgtttttgtgaaactctttaggatggaaaagggcatctctgaggtcagcgacagaagccgtggtggtttcatgccaccagtttacctttgtcctgagctgtggaggttgtttaaagctatagatcaaatgaagcctggaatataagggtgcagttaggatgattgctgtgtagttattttttaaaacggctttttgaggcataattaacataagctgcgtatatttaaagatacagttagataacttttgatgtatgcaaacacatataaaacatgtataaaaccctcgctgccgtccagatgatgaacctgtccgtcacccagaagctctctcctacccacacccctttctccccaggctgcagcagtctgcttttgggcctgtagattcgttgccttccttagagctttgtctaaatgaaatcctacaatatgttcttcttttggtctggcttccttccctcagcgtcattattttgggctccttggatgcgtggcgtgtgctgggcagtgttcccctgcgtggatgtcgcgtttgttcctccatttgcccgttggagcgtgtggagtgtttccagttcttgactgtcacaaagaaagcggctgtgaacattcgggtacaagttgttgtcgggatacacggttttatttccctggatagatacctaggtgtggaatggctggatcatatatttgtgcttatgtttaacttttagaaactgccagactatcttccaaggtggctgcaccattcctcgtcctaccagcagtgagtgagagttcctgctgctccacgtcctggccagcgtgtgtggtgggcgggcttaggcgttcagccgtcctgatgggtgtgcggcggcatctccttgaggtttaagttgcgcttccccaatcgttgagaacgtagagtggcttctcttgtgcgtatttgccaccatatgtcttctttggtgaaatgtcccttctgatttttgccagttattttagactgggtttgttgttttactgttgactcgtgagatctttacgtattctggatgcaagtcccttttcacatttgcgccttacgtagactttgtccctgtccatggctttccttttctgaacggtgttttttgaagagtagaactgcaaaatttttatgggatccaatttttcagtttgttctttttctttttttttttttttttttttttgagacagggtgtggttctgttgcccaggctagagcacaatcttgtgatctgggctcactgcagcctttacctcccaggctgaggtgatcctcctgcctcagcctcctggctagctgagactacaggcacatgccaccacacctggctaatttttgtattttttgtagagacggggtttcgctatgttgcccaggctggttgcgaactctagctcaaatgatccgcctgccttggcctcccaaagtgctgagattacaggtgtgagccactacgtccggcctcagtttgttcttttggtttggacttcggtttcctagctgggaactttgtccctaactcaaggtcacagagattatctcctgtattctagaaattttgtagctttaagttgtatatttaggtctgtgatccattttgagttaatttttgtgtgcaatgcaaggtgtggacctgagttcatttctttgcctaaggtgttcagatgtttcagtggagtttgttgtaaagattagttctctactggattgtctttgtgcctttgtcagaaatcagctgtgcagatgtgtattcagttgatccacttgtttatctttttacatcaacgccatgctgttttggattattgtagctttgaaataattgttgaggtcaggtgatattcgcgctctaaccctgcactttttcagagctgttacagctattcgggatcttccacttttccatatgaattttagaatcagtttgtcaatttctgtgaacatttctgggaaattttgattgggattgtattgagtccatagataaattgggaatatcttaacaatcgggagttttccgaccaacggaaagctctctgtttatgggttgttattaatttagtattttgtaatttttagtgcacaggtttttaccatcttttgtcagatttattgatttatctattgaggttttttcttggtcttgtaaataatatattttaaaaattcgattactggatataaacggccactacagttcttatatgttgatcctgcagcctgtaaccttcctaacttgctcatgagtcctagtggcttttattgtagttgccattgggttttctgtgtagatgatcatgtcgtctgcagtaaaagcagtttcacttcttcctttccagtctggatgcttttttatttgtcctgcttaatggcaccggctagggcctccagggcagtttgaataggagtggtgggagtggacgccctcgctcctgatctcctgatctggaaggcgtggaatcagagtttggatgggagtggtgggagtggacgccctcactcctgatctcctggtctggaaggcgtggaatcagagtttgggtgggagtggtgggagtggacgccctcgctcctgatctcctgatctcctggtctggaaggcgtggaatcagagtttgggtgggagtggtgggagtggacgccctcgctcctgatctcctgatctcctgatctggaaggcgtggaatcagagtttgggtgggagtggtgggagtggacaccctcgctcctgatctcctggtctggaaggcgtggaatcagagtttgggtgggagtggtgggagtggacacccttgctcctgatctcttgatctcctagtctggaaggcgtggaatcagagtttggatgggagtggtgggagtggacgccctcgctcctgatctcctggtctggaaggcgtggaatcagagtttggatgggagtggtcggagtggacaccctcgctcctgatctcctgatctggaaggcgtggaatcagagtttgggtgggagtggtgggagtggacaccctcgctcctgatctcctgatctggaaggcgtggagtcagagtttgggtgggagtggtgggagtggacgtcctcgctcctgatctcctgatctggaaggcgtggagtcagagtttgggtgggagtggacgccctcgctcctgatctcctggtctggaaggcgtggaatcagagtttgggtgggagtggtgggcgtggacgcccttgctcctgatctggatttggcaccgtcgagtgtgatggtgcatgttgggttttcgccagtgccctttatgagtccgaggaagtccccagaatacggttcctagtttgatcaggaaggatattgggttttgtcaggtgtttttttttcttaatttattgagattattaatatggtgagtgtctttctatttcaggttactaatgtgatgaattatattgactgattcttgaatgctaaaccaattgttcattcctgggatagccccccttcagtcgtgatgtattattattttagaatattgttgaatttgtttttttttgtttttgtttttgagaccgagtcttgctctgcacccaggctggagtgcaatggcgctatctcggctcactgtaacccccgccttccaggttcaaatgattctcctgcctcagcctcctaagttgctgggataacaggtgtccaccgccacacccagctaattttttgtattttcagtagagacagggtttcaccatgttggtcaggctggtcccgaactcctgacctcaagtgatctgtctgcctcggcctcccaaagtgctgggattacaggcatgtgccactgtgtttggcctcttgagttttatttgctaaaattttgcttagaattttttttttttttttttttggagacggagtcttgctctgtcgcccaggctggagtgcagtgacacgatcttggcttgctggaacctccgcctcctgggttcaagcgattctcctgtctcagccttccaagtagtagggattacaggcgcatgccactgtgcctggctaatttttgtatttttaatagagacggggtttcagcatgttggccaggcagtcttgaacttctgatattaggtgatcctcctgcctcagcctcccaaagtgctgggattacaggcgtgagccactgcgcctgccaagaatttttgcatttatattcatgagggatgttggtgtgtgtttttttttcttcttcttcccgtgtatctttgtctggttttggtgttaacagagtaatgttcttgtagaatgatttgagaggtatttcctcctaagttttctgaagaattttttcttttaaaaatgtttggtggggggactgggcgcggtggctcatgcctgtaatcccagcactttgggaggccaagtcaggagttcgagaccagattggccaatatggtggtgagatggttcacccatctctgtgccactgcacttcagcctgggcgacaaagcaagactccatctcaaaaaaaaaaaaaaaaaagtttcgtggggctaggcatggtggctcacgcctataatcctagcactttgggaggccaaggcaggaggatcccttaagcccaggagttcgagaacagcctgggcaacatagggagacactgtttctattaaaaaaaaaaaagtttcgtggaacttaccattaaaacctactcggacccagagtgttttttgtgggaagatttttagctatatagactattcagtttatctgttcttggttgagagttactggtttgtgttacacaagtaattttctcaattcaactaaaaatgccatttctccctttgtttctgaaaggtatttgcgtaggtatagaattataggttgacttcaaaaagtttcaattttttttgtggtttaatttaatttaatttatttatttgagatggagtcttgctctgtcacccaggctgaagtgcagtggcacgatctcggctcactgcaacctctgcctctgggttcaagtgattctcatgcctcagcctcccgagtagttgggattacaggcacccgccaccacacctggctaattttttgtatttttagtagagacagggtttctccatgttggacaggatggtcttgatctcctgacctcatggatccgcctgcttcaggtttccaaagtgctgggattacaggggtgagccactgcgtccggcctgttttatttttttgtagagatgggatttcaccatgttggtcagcctggtcttgaacttggactcaagcagtctgccctccccagcttcccatagtgctgagattacacaggcatgagccaccgtgcctggccccaattttcagtactttaaagatgttgctgtactgtgttcctgcatgcgtgcttccagagagagatctgctcatcctcttcttgacggacatgcctcttctttttttctttctttcctttgtttttttgagacagaatctcactctgtcacccaggctgaagtgcagtgggacgatctcagctcactgcaacctctgcctccgggttcaagtgattctcatgcctcagcctcccgcgtacctgggattacaggcacccgccaccacgcctggctaattttttgtatttttagtagagacggggtttctccgtgttggccaggctggtctcgaactcctgatctcaggtgatccacctgccttggcctgccaaagtgctgggattacaggagtgagccacggcgcccggctggacatgcctttctttaagattgtctctttgtcactgctttgagccactttgctgtggtttccccgtgccgcatgtgtttggagtacgttgtgtagtttttgtcaggtttggaaggtgtgtctcctgcgtccctcctctgggcacttggtggcccgtgtgtcagtcatgtgaatgttgtcagctcagggtgctcttctcatcttctggattcttttttttcctctatttccctgtgagtagtttctgttactctgtgtccatatcacaaaccttttcttccacaatgtctcctccacggttaatcccatatagcggatgtttcatctctagaagtttgatttgggactatattatatctttcgtgtctttattttactcttttaaatatgtggaatacactgtaataacagttccagtgttctctgtgaatttctatgtctgtgtcaattctggttgtttgcgatggatggatgattttcttcattgtggtccacattttcttgctttctggattctagacgttttgaaatgtgcctgtttgggtgctgaatgtttttgtattcctataaattggctgggcatggtgactcacaccagtaatcctagcactttgggaggctgaggtgggcagattgcttgagtccaggagtttgagaccagcctgggcaacatggagaaaccctgtctctacttaaaaatacaaaaattagccaggcgtggtggtgcacacctgtagtcccagctactcaggaggctgaggtgggaggatcatttgaacccgggaggtggaggttgcagtgagcttcaatcgcgccactgcactccagcctgggtgacagagccagaccctatctcaaggaaaaaaataaaattaaaaaaaaatcttgagctttgtctagactgcgttcagttatttggaggcagcttgatccttttgagtcttgcttttgtgatttttttttaggtgggtctagagctgggctcagggctcattctaggcctgataattcaccactcctgtggcagaatcttctgagagacataggaccccatgaatttgggcaatttcctgtctgtcgggtggagacaggctctctgcctagcctggtgcaagcctcaggcctgttgtctctaaatctttgtgggtgactcttccccagcctcgtggagtttctgcacatacatactgtgatctggggtctgcggaattgccaggggcctctgcagaccccaggccctctgtgtggtgctcccttctctgctgctccgtcctgtgaattccagccgccatgctctccctgaattgtcagctccatctcaacccagtttctgctgggccctgcctgggtcctgcttcctgtaccatggctgggaactctcgggaggcagtgagctggggctgccagagggcttggctccactttgaattttggggaccaccgtcctttgctgcctgacctccagggtccctggggccattgtctcccatctcctgtcttgtctgcgtttttggcctttccagggaggagggtgatgggtctctgtgacttcaccttggctgcaggcgggccctggcatcgcagtccatgagtgacctccagcttctctcatcagccaccccgttcatccactccatttgtaaaatgagatagaaaatgaagatggtgctgtcgtcacagcggccggatatctgtagctcgtgggctcccctctaggctgaggctcttgttgtgggagaaagttgctcagggccaagtttcagatagaaagagcgaaagtaactggaaatgttgagatggccctggaggccctcagggtggcctctgcttcagggaggaaggtgggcaaatcacgctccgtggcagcaggtttaaaaacatcgctgaattgtgctgactggcacatccattgtgagcggatgtgttttccttctgcaataattttggctacattaaattcgttttgttaacatcttcatcaccgccttttcagtttcagcgggaattgattatgaacaaagtgccatgattttgactattcaggcgagcaactgcatcgagccagcactgaactggttttgtaacaagcttggtgtccatatcgctcttaataacatctgcaggcacaggcgacgatagcagttgtgggccagccgtcaggaaaggggggactagcacgtaccactcagaattcagcttgcgcgggctgcggtggagttctggggtttgtttgtgggcatttccaggtagtctgatcctgtgaggagcaaggaaggggtgtgttgacagggccgttcgggccggagcaggtgcgacaggaatgtcccacgtcctctcgtgtgctgtcgggagacaaacctcttcctgcttcaatatcccattcgttccagagcctcctttcagggtggaaggggtggtggatggctttgggattgggccaggcctgagggcactgagggagtggggcattaggggccacgtggtcagcactgcactctgctctcatcggaagctgggcagtggccagaggcctgggaaaggcttgttgtgggggcggggggcgcaccacacttcagggatgcagccggcctttgggcttcaggaaacgcagctgggacatcctgaggtgtgtgaggctgatgcatgggcctttctacttccagactgtcccaggacacgggtccacggtcacacggtctccaaatgagcaggaacaccttgcatgccctgcgagatgtgtttgaaagtcacactttggttccaggtcacagcttgaacctcaggccacctccagtgggaggctggaggtcctgtgtgccacccggggcctgtgtgctgtggtggtcgtggctctgtgggtgccgggcagaggcctcccaggctgggcagccgccacccctctgtggacgctactcacccttagaagcaggttcccacaggccagggcactcccaacagcactgcgtggagctggtgcccacccctgtggtcagatgcatggcgcccgcagccctggcccaggtgccccctgggttgtgcggcggggccctggctctgtgggtgggtggctgtgctgccgctgctgtcgcccatccttgggggccggcgtcgcctccctgctgctcctactgtgtgctttcttgcccctccagtgcctcccagggggctgtgtagccaggtgtctcagagggctcagggctcctggtagggtttgggtgggctgaaccctgcaccctggcccgggtgtggggtcctggtgctctgtggcctgggacacccgtgcttcctgcaggctctgcgtggcgctgatggagggcctcttgttaagggggcacggtagtgagtcaggtgcccgggggctcataagccaccttggggtatgtctgggtgcatggggactcctctggcctccccagcggtgctgagccgtcactgcagggcagccatggcccatttggctggtgctgagacaaggtgaattttcttggctggcttgacaggtccccctttccctcaccatggagtttcacccaattttcagctttgacggagaaatgaggcttggagtctttttctggcctgtgagggctgcagagcagcgtgcccaggggctgtaggtgcagtccagggagaggccatgacaggagtgggtgtggggactggtggggacagcgactgtgccttctggccccacccagagagccccagctgctgtgctgccgtattctgattccttcttccctccctccctcccttctgcctttcccctttatcctttccccccttccatgtccatttcccttttccctccctccctctctttccttctctccttctctccctcttcttttttcgacagggtctggctctggctctgtcacccaggctggagtgcagcagcacagtcttgcggcctcaaccttgttggttcaagtgatcctcccacctcagcctcatgagtagccgagactacaggcacacaccactacatctggctaacgttttatattttttgggtagagatggggtctcgccatgttgtccaggctggtctagaactcctgggctcaagcgatcctcctgcttcagcctcccaaagtgttgggatgacaggtgtgagccaccgtgcctggcccatgtttgattctcgatgcagatccagccctgggaagaaagcaccgctggccatgactgggcagagccagagagtgactaaggggctgttaggacagagacagtgggttttgcagtgatgtgagctttgacggaagtggccacactgcaggcccccacagcgtcactagtaggccaagcggacactgcgggacacgttccccaacgtgggatgtccgtcctcagcagtctgtggccttctgtgaagcaaagccgttttgcaggctgggttcatccccgttccaggcccgcactagtggcgcctggttatcaggtgtggtgaggagctttgctgccctggagcgtcgctttgtgggcagaagccaactttggaatcgcctcatggctggccctggacctctcctccttccttccttgttggttgctgttaagccagccttgggcaccagggacagtggggacgtggctgtgcaccgggcccagggctggcaggaggctgcttcagggctctggaccagagcagtgtgtggctggtggtacctgtggctggcgtgggtctggcgggtctggtggtgcctgtggctggcgtgggtctggcgggtctggtggtgcctgtggctggcgtgggtctggcgggtctcgtggtgcctgtggctggcgtgggtctggcgggtctggtggtgcctgtggctggcgtgggtctggcgggtctcgtggtgcctgtggctggcgtgggtctggcgggtctggtggtgcctgtggctggcgtgggtctggcgggtctggcatgtttggtggtgcctgccatcaggctgccgatggatgagcctgcctgtcccccacggattggagttttgcccaggggtgctgtgccctggtcattgtcccctacagccaggcagtaaagtgtggccagcaccttgctgcaagagagggacagaggtcatctgtctacgagctagagcaagggcaggtgggcccactggctggcgctgcgtctgggttcggtcctggacctgctgcgtgttatcctccctgcgggcctggcatgggagtaggggctgagagatgctggtgacaccactctgacgccacggcctgaggcagccgttggacagtgcccatcttgaatgcagccctggtgacctgaagcccctgcgttggtccctcacaggccagggggtgtggccacagggcctgggctttgtcccgtttacgagaggtcaggcggtcacagggtaatgggaggcctgtggttcctgggctgccatctggcgattgtaaaacgggcagtgtgcagtgttgagggggcgctggggaaacaagctgccggctgaggaggccgcactccccgtgcctcccgggcagacacctcacggcctttctctgggtgtctgaacccaaggtgaaaagttcaggctgtccctgctctccagaggggctggaggtggggcgggagcagagactggacctggccagcccctcccgcttcccttcctctgggcccctggactctgggggcgagggcagggctgtttggctgttggacatccttgctgtccctttgctggactctccagaggaccagcatggaggtgcacaagttcacatttgtccctctcctgccccagggcacctggccctgtcccgggccaccccaggctggaccagctgcccatgtcaccaggccaggcgctttccctgtgaatgagccgatggccgcaagtgcctggcctcaggcctgggctgtggggatgactgaggcccagtgaggagtgggctggggcctggtgtgacctgcacggtctgtgggggttggagggatgcgcgacttgggcccaccccagaacttggggtttcctgatgggtgttggggtgcacacaagcctgggctcctttgtgattggcgaccccagggtcccgggacagtccctgagaagcacagaggcctggacactcccacctcccagtcaggccctgccacatcctccctgatggctccaggggcttttgttcactgaagaacacttgctgtcctcccctcagaagagtctgctcggtgggggagccgcagggggctgctccctgtccaggccagagaaaccaggcagcctctcccgccgggagaggtcccccacaggagcctgttatggagccgcgtggcgcctgggctggtgtcacccctgggagcccccttttaaagaagactcattcaatgtccctctctcagacggcctccagcgtggcgattaagcgctcagatgctggcaggttccgcggagtgcccggctgccctcggcaggggctttgtgttggctgccctgccccgggctgaccccagacgctcgccttttgtgctacgctgctctcgcccctcgggaacctttgtcccattgagccccgccattgcctggggccccttgcctgtccctgcgggcccgccccagggcggggattgtggccctggtcccctgggggggggtagggggcttttggtggcctaaggggaccctctgagcactcatgcaggcctccccccaacctcacgtccaggtctgttgccgaggggccaggagattctgacattgtgcgatggccccagaggttgacatcctggggaggattggctggtgatgcttccagaaagtggtttttgaagatgcatctggtcctggcccgtggatggctggcgggactgggagagacactccgggccactggctgctttctcgcagctgttctcctctgggaggacttgcccctgtgggcaggtgcaggggcactgagcggaggggcttgggggcccctgcccgccccaggccaccttgctctctctccaggcctgcgtcctgcaaagaggccgggtcaaaaggtcactgccccgatttttattgctgtctcttacgttctcacgacctcttgccctctgcacagatgggcggggctggagcttccacgagggccggcctttccggggattaaaaacccactgaaaggtctgagcctagctaccaagcttaaatgtcttagtagcttaaaaatggtgttaaaaattaagcaaaacacacatagacttccaggtttagcataaatagaaaccagaggtgttgagaccgtgctgccccctcaaaccagcgcagtggaaagaggggcagagccctccacaggagccctccgctggggggttggggagacggccctggcccagcgtctgcagctcccagcggcactgaatggcagtggccgtccctgtggtctgggggcctccttcccccacaggctacacaagccctggtcctgccaaggctcggggaagccctttgtgactttagaaaaataataatggagggtgaactggttcctatttttgcattgtaattgattgccaagaacccctgaaattaaatacaaccatgtattttaaatggtgtccttaatgtagaatgtttttatcaaaaccaaaactccctgttgaggccttagtgttctgtcaatagcgtgttggagtctggttcccgtctcccctgccccggcctatgtgtgctgaccctgggaccggtgaggcagttctcaccacgccccgagcctccccctcccacgccccgagcctcgccctcccacgcccctcctgcccccgaggctcgctggcgtctgtgcttcttccaggcggagggggaggtggtaggcaccttgggtcttaaatcagagaaactgtcccagcagtagtaaaagtcatcagctggccccaaagagcccctggaaacacaggctgtaccccgcctccatggagacatttggtgccacctgcgttcagtgcagatgccacacggctcttcctgagatggcttccgaggccatttggcccttcatctcgggaacagaccaagggggtgttttcggccgtctgagacccacctgggggtgtctgggccttggccatgctgccttctccaagccccatgcttctcccggcccctcctccttcccactggcgccggagacctttggtagtgggtgtggaaagacagcagctgtggggtccctgtcctggccggccactcctccttcccgccagtgccggagaccctcggaagtgtatgtggaaggacagcagctgtggggtccctatcctggtcagagggtggcattcctcccacagtcctgggagccacagggctgagatgggacttctcagcttggcatggggagggcaggacggggtggctgccatgcctcattctgtctgtgatggaaacgggagggcctggccctgcctctgttactgagcttgagccagggacacccgtgaccctgcctggggcggtcctccccagccttgtgagccagggcagaggtgcaggttgggtggctgacctggtggggggtaagaacatccacggagaagtgtgacgagtgtgcgaccagagtgtggacccagccaggaggcctgaccgtgactgcagcctcccccagcattgcaccaaagtgtgctcgtgcaggacctcgaagatgccccgtgggcagcgttcgggctgaggctgcagggggccttgggagcacggtggccctcctgtctgttctgtggaccgggtgcggatgggccgtgcaggcagacgtgctcttgggtggttgtggtggggatgcctctccgcccaccaccctctcactcactgccctggctggaaggtgacggcatctccctgaccggcagcgccaggatggcagccccacaacagtgtcctggtcgccccagaggcatgctgagcgcccatgcgtgtgcgcaggtcctacgggccgtgtccagacccagccccggggtcaggtgacacctgtagttgggtgagcgctcacacaggcacctccaggtaagggggattgaggaaggtagcgctttgtcaatggcactggttttgctccgaggctggactccttttccctttgaggagctctgctcatgtgctttgcctgctttcccatggcaggctttttattggttaaataaagacacaaacttttcatcagtctttgcaaatacttggttccggcaagttcttggcccttcccaggcttggggctgccggctcacggttcttctctctgcatttcagccaggcccccatatgctgggtttgcaggtcacgaccacccatgacggctgtgctgcgtggggtgcagttccccgtgggcgccgagggtggtgtggggctgcctctcgctcgctccaccagccacccgagggcccgtgtcctggtcgtggccgcgtgtgctctgctgtgtgggtggtcagtcctccccaggggccacctggatggtgtccactcctgccccatggcaggaagtcccagcggcacctggccacgtccctctaacatgtttctggaagtgggattctaggctggagcctcatagcgggcagatactgccccctggccatgagccatgacagttggttgatgggacttgaaggggcctctggacagtgtggctgcagccctggaccctaggagaatagcagccgtgatggggggcagggaccccactttctgggtgggagtgaggagggccggctgctgccccttgctgcagtcatcttcagtcactttcccggccgccacggccccctcctggcttcttgctctcagcagaggggacaagacccttgtgagggtgggcacaggcactccaattgtttggggccttcgctgtcccttgctgtctgtgctggtctttccaggcatccccaggccgtgtgtgtcagcaggtggaggctgggcacctctcacccacccaagctgaagcggcctcacagggggtggcaccaggtgtttctccagctgaacaagctcgccctggaacccccaccctgaaagggctactgcccccatgagaggagcttctagagatggtggccagccttgggggcccggtggagatgtgttcgcggggtcctggtctgattctgtcttggaaggaacatcgggcccctgagaggtcagagcagtggccggcccacggctccgctcaggcgccacggcggctcctttctgtttcttgtagtcactgagttcgaggttcccacagggaggaggcttcctgtggctccgccgtcagggagcagtggggctgccccagcctctgggggctttttaggtgctctgaggcgatctgggtgtggcctggccggtgtgggcagctttgcccttcgtctgagaccccgagccctggggcaggatgaggggtgtggggagagtttgctttttccagagacgtttatctgttttttttttagacggagtctcgctctgtcgcccaggctggagtgcagtggcgcgatctcggctcactgcaagctccgctcccgggttcacgccattctcctgcctcagcctcccaagtagctgggactacaggcgtgtgccatcacactcggctaattttttgtatttttagtagagacggggtttcaccgtgttagccaggatgctctcgatctcctgaccttgtgatccacccacctcggcctcccaaggtgctgggattacaggctgagccaccgcactggccagcgtttatctttaaatgtgccttggacctggcccctggctctttgggagggagagtccttggcaggccccgttgcctccaccccaccagtgcaccttggctcctggtcactgcccaccctccctgcccgggcaggaattcttacaggccctacactcctgaagggaaatcaggctggtcctggggcaggcagcctctcagagctgttgagaattgagcaatctccttgtgctctttcaagctgttcttttctttggttcacactgagcaagggctggttgctccgatagggagaagacgtgaggagtggcatttactgtgattgagcacagggcctgtggactctcccattcacgcagccacatttcccaaaaagaagtggtcctgctccccaccccccgacccccactgcagcgccacctgcctttatctgtacttggagggacagcgcagcaggctgtggctggctaccccaggtggctccacccagctctcagaagttcacctgctgcactcagaggccgtttacttgaggtttgatatttatctccaaaggaagggctgccccgactggcctggaccctccagggagttcagcaagccggaaatgcgtgtctgctgctctcctggcccctgggccacctgcttctgtggccctgggattggggagccagggctgagggcctgtagggccccctgtctgtgcctctagaggccctgagccacctcctgcagtgttttagatcccataagcaagagacagaattgtgcatggatggtgagaaaacatgaagctttttatttgtaaacagaaaatggcagggctcactgtgtggggctggggacagcgctaggcctgctttaggccgtgcaccccaacctggggtgttccaccaagaggggtacagtggcctccactgtgagtatgtggccatcctctggctcctgattgctgagttcctgattgctgtctttgcgtaacttaggaaccccgatgaagagcccgtgctcatagctccgttcctgacatgttcaggaacgcctctgttgaggtttttctctttggttctggaattcctgggtccctttgacccctgatgcgtttgttttgggtgttgatgagcactggagctgcttccccacagggatggggcattggggagattccgacacagcagggccctcacccaggaggctgctgtgggtgctggagcggttgcttccatggagctgggattcctctcatttggggctgtaggaaggggtctttcctctctgtgctaacagttgtttgtttaaaaagaaaggctgtttaaacctttcaaacttaaaacttctttttttctttggagatggagtctcaccctgtctcctcccaggttcaagtgattgtcatgcctcagcctcctgaatagctgagattacaggcacatgctaccatgcccagctaatttttgtagttttagtagagacggtgatatggtttggctgtgtccccacccaaatctcaacttgaattgtatctccaagaatttccatgtgttgtgggagggacccaggggaggcaattgaatcatcgggctggtcttttctgtgctattctcgtgatagtgagtaagtctcatgcgatctgataggtttattaggggtttctgcttttgcttcctcctcattttttctcttgccgctgccatgtaaaaagtgcctttcaccacccgccatgattctgaggcttccccagccatgtggaactgtaagtccaattaaacctctttttgttcccagtttcgggtatatcttcttcagcagcgtgaaaatggagtgcacacacacgtcagcactgtgggcgcacacacctgcactcacacattcatcaggacccatgggcacacgtgcacacacacgtcagtcctgtgggtgcacacacctgcactcacacattcatcaggacccatgggcacacgtgcacacacgtcagcaccgtgagcgcacacacctgcactcacgcacacacctgcactcacgcactcaggaccgacggacatacgtgcacacacacatcagcaccgtgggcgcacacacctgcactcaacgcactcgtcaggacccacgggcagatgtacacacatgcaccagcacccgtggacacgtgcacgcacacatcagcacccatgggcatacatggatgcacacatcagtaccatgggcacacacacatgcacccactcccgatggcttcggcttgctgggtgcctgcttcgccctcgggtgagcaagtctggaggcaggcacttggggtggggccacagtatggttcttaggagcccagtgtcccctggacccacttgctcccagccttgggtcccaaagtgctgctcccactggtctctgtgccccacccatcatgggcagggctgtctgaacagggcagagtcacgagtgatgcaagggtggggtgtggaggccttgcctagaggcagcagccagctctggcttggctgggccttaccttcactgtcctgctgtgagacgcaggagccctgggggaggacggcagtctgtatcagggcagtggtgaaactgcagattcctaaatgtgatctggagacgactcttgctggagaaatctacccaggtcccttgggtctgtccctcccttcaccctccacagtcagggacaggctgcgtggtgtgcctccccatctgtgcgtggcctcagcgcagcaggcctgtcctgcccattgctaaaggtagagcccggcagattcattgtgtggtgagggcttccccagacccaccaactcctgtgtcttcccatggtgagaagggtggggtctctctggggcctttttttttttaggaagtcactgatgccactcaggtgggtgcccagctccccacctgatctctggagtggccccttctgctggaggctgccccaggctggatgccgtggcctgcagaccccccttcttgcagtccctgggcaggcagcacccatgcgcacacgtgcacacaggccgtgagcactgccctgtgagccaggtggtggtggggggtgttggggctaaggtttggttagggcccgagtgcttgcgcacccccccatccaatttcccatggtgctgggatgctgccgcctcctggaccctggcgttgaagtgccaccttcatctccctccccagacagtaagctccagacaagggcaggctgtggccgtcactctggccagctgctcgggggcttggtggctgctgggtggtcgcctggactctgccctcctgtctcctggtgtcccggaggggccttgctgggctgggccctccaccgccccattgggcgcctgactctcagggcgcagtcagttctttggggatggccctgatctctgagcgggactgcctctggcctttcttctgcatcccctacggaacagcagcctgctagacgccctgaggaggcaggctgaggggtggaaggggcgtggccgtgcccagcagagaccaccctctgatgacggtgggcgtcctttccagcccctctcggggcatcgcttcatcccttcccccatttccttcctggccctgctctccaagtcttgtgtgtgtggtggggcctggcttccctcccggcctctcgcctgttcccgcccatccctctctggttctctcaggcctcctctgggcttgccaggaatgtaggggaattagggggagggggacacaggaaatgcctcccctcctctgacaacagctccagctgcagggggaggggggaggggagagcagagtgggtgagacgagggagggctgaaggggggagtcggcttggggggagagtgttctcctgcccacccaggcactgggcgtggcccagccccacagacagaacagttctttcttccttattttattttttattagagacagggtctcactctgtcgcccaggctggagtgcagtcgtgtgattggcctcaagcgattctcccacctcagccttccaaagcactgggattacagcagtgagccagtgtgcccagcctcttcctaagtttacaccagtgtgggcatccagtgaggggaactggcctgtgatgcggtggtccttgtgacatgtcaggcagttttagagtagggtttgttaaaacatgggttaaattgggccccacccccagccctccactcctcagccattcaggagaagcgcgaggcatgggtgcgcgaaaattctgagtctgccttccacctgaaccccctctggaaggtctgaccacgggctgggtgtggtggctcatgcctgtaatcccagcacttttgggaggccgaggcgggtggctaatgaggtcaggagttaaagattagcctggctgatatggtgaaaccacgtatctactaaaaaaaaaaaaatacaaaaattagccggcattgtggcaggtgcctgtagtccccagctacttgggagggcgaggcaggagaatcgcttgaccccgggaggcggaggttgcagtgagctgagatggcaccactgcactccagcctgagtgacagagcaagcgtctgtctcaaaaaaaaaaaaagtctgaccacagccccttctcacaagggggctgccccttctaccctcgttggggaaggcctggtctgctgtaagtgcagtgaccggacattaaaataccccggaatggtcttggaaagagccacttctgggagtcttcccttacccgccacacaccttttaaagagaaacctgaagacacctgagaagacaggcggcggcggcgatcttcagagagaagatgcccgagaagacaggcggcggcggcgatcttcagagagaggacacccgagaagacaggcggcggcggcgatcttcagagagaggacgcccgagaagacaggcggcggcggcgatcttcagagagagagatgcccgagaagacaggcggtggcggagatcttcagagagaggacgcccgagaagacaggcggtggcggagatcttcagagagaggacgcccgagaagacaggcggcggcggcgatcttcagagagaggacgcccgagaagacaggcggcggcggcgatcttcagagagaggacgcccgagaagacaggcggcggcggcgatcttcagagagaggacgcccgagaagacaggcggcggcggcgatcttcagagagaggacgcccgagaagacaggcggcggcggcgatcttcagagagaggacgcccgagaagacaggcggcggcggcgatcttcagagagcggacgcccgagaagacaggcggcggcggagatcttcagagagaggatgcccgagaagacaggcggtggcggagatcttcagagagaggacgcccgagaggacaggcggtggcggagatcttcatagagaggacgcccgagaagacaggcggtggcggagatcttcagagagagagatgcccgagaagacaggcggtggcggagatcttcagagagaggacgcccgagaagacaggcggtggcggagatcttcagagagagagatgcccgagaagacaggcggtggcggagatcttcagagagaggacgcccgagaagacaggcggtggcggagatcttcagagagaggatgcccgagaagacaggcggtggcggagatcttcagagagaggacgcccgagaggacaggcggtggtggagatcttcagagagaggacgcccgagaggacaggcggtggtggagatcttcatagagaggacgcccgagaggacaggcggtggcggagatcttcagagagaggacgcccgagaagacaggcggtggcggagatcttcagagagaggatgcccgagaagacaggcggtggcggagatcttcagagagaggacgcccgagaggacaggcggtggtggagatcttcagagagaggacgcccgagaagacaggcggtggcggagatcttcagagagaggacgcccgagaagacaggcggtggcggagatcttcagagagaggacgcccgagaggacaggcggtggtggagatcttcagagagaggacgcccgagaagacaggcggtggcggagatcttcagagagaggacgcccgagaggacaggcggtggcggagatcttcagagagaggacgcctgagaagacaggcggtggcggagatcttcagagagaggacgcccgagaagacaggcggtggcggagatcttcagagagaggacgcccgagaagacaggcggtggcggagatcttcagagagaggacgcccgagaagacaggcggtggcggagatcttcagagagagagatgcccgagaagacaggcggtggcggagatcttcagagagaggacgcccgagaagacaggcggtggcggagatcttcagagagaggacgcctgagaagacaggcggtggcggagatcttcagagagaggacgcccgagaagacaggcggtggcggagatcttcagagagaggacgcctgagaagacaggcggtggcggagatcttcagagagaggacgcccgagaagacaggcggtggcggagatcttcagagagaggacgcccgagaagacaggcggtggcggagatcttcagagagaggatgcccgagaagacaggcggtggcggagatcttcagagagaggacgcctgagaagacaggcggtggtggagatcttcagagagaggacgcctgagaagacaggcagtggcggagatcttcagaaagaaagcccagagttccatagtgggcgggtgggcagtatttcggcttgtgtggcaccagggcagggcctccgaacccatggaaagccttgcttcccccaagcccgctggctcccagccctccaccctcatgatagggcctgggtaggggctgctggtcaccctttacccccacccaggaaaaggtcaggaggctgggctccccgtcaaggagcggtttccagggacaccggctctcgggggcgccagtcctgtccttggcgcccagcacatgctactagtgacattcgcaagggtgggtctggttctcagcctccgacctgtcaccccggtgtgggcccagtgacctcagtgagctcctcctgtgccctaagctgagccactgtgtacactgaagaggaggctggggtcctgtgtgcacctggcccgcttcccttgccggtgctgggagacgggagccagtctcggaccctcatctgccagcagctcctgtggctgtgggggcgcaggcatcttggctgactagggaggatcccgtgggaatgaccccacgccatggccagggaggcgcccccacccggcccaaccgcctttgtcggggatcctgagaggctttgtgcggaggctgggtcccaggctgggttccgagggtgccggtgcgcccctcctatgggtgaggctgtctgcttacagttgaacacttctccccacttctgcgccaggcctcactcagtctccccagcacggagctcttgttgctggcccagggcctgtccaggtcctttgacagggcaaggactcagagcctcaggggggggagggcagggcctcctgaggagtatgtctctgtgaaaatgggggtgaggaggtggcaagcatcgccttttgaggacagagtcttggagaggtgttggctttctagggagggccctgtgattctcctgcaaccatgtgggccggggccaggaccaaagccatcgtgctgtcgctgtggatttggtggccgcttcccctgctcagatgttgtactgcaggcctgggccttggcttggggtctctgtgtctccatgttcaggacaggcttgtggctttgggtaccacgaggggccatccagcccagggggcttcagggagctgcccctcaagtgcatgtggggtgctggggtgcagccctgctgcccatggcccggaagtccaggcagcactgctctggttcgaagctgccccaagggtacgggaggcccgtccactagaactgaggcctggcaccatgttgtgtcggttttcatggcgagaaaacatcgtgggcgtctgctggggctggaggaggcgggaggccgaggcagcaaagctgacccgctggcgggtgggggccactgtggcgtccccttcctgcaggaggcggggaggtgcttgtttccctccagagctgctgtctgcccgcagctagtgccctgttagcaggtgcagtgcccgtgccatcttctccccagacccagaccctccccaactcatggagaccctgtcctccgggccatcccccgtccatgaatgcccggggcttggggtccatctcctgtccacatggacctcccctcttgggtgtcacagctgcatcagaggccccagaggccggccctggggggctctggccccaacacagcgtcctccccgttccactggccggggctccctcaggttgctgccctgcctctagatccctgatccctggacccatgctgccgagacgtcctggtagggttgagttccctcctctcccaccccgaggcggcctgagaagagcctcttggaggttcaggtgacctggcctgggtcagcacagtagaggcggagctgccctcagacctcttttgtaacagttatctcatggaaacctaaaacctaattgggcaacggcagctccgtgtgaagtagagattgtctggaagagatttgtccctgttctgtggagcagggcagatgcagctgaggtgcctgggggggcagggacccttccccagtgggctcaccccagtggtgtgggggtggtagaattcaagctcacaccggcccagagggcccgctgtccgtgtggacctcctgtgactgcatgggcctcttgcggcggctccctcccgccccacaccggcctatgagccctccctggcccctgggtggctgggagggctccaggcagggaagagtcagggaggggtggatggccggcgtggctgtaagaatgacaggtggacacgggggcccaccttggcctgtgctgggggccccggtggctggagagtgagagtgggtgctctcactgagggtctgaccctgctccgcagtgcagtgtggaggtggttttggtgccacacacagcacaggtgcaccatgcgggcctttctgatgatcagaattcataagtggttttattttgtaaattaacaggacagaaaagcctttttgttcttgctaaagttttatgatttcgtgtttgggccaccagggtatctggaggctgggggcagtcgtggccagggtcagagtctgggttggagataggtgtcatgcggcagttggtgtggccgtgtggacttgtccccatctgtctagtaaatttccatctgccctgacgtcagctgcctttttgacatgcatttggaaggtgttaacaaatggacttagattcttccaggccggtcgcagtggctcacacctggaatcccagcactttgggaggccgaggcggctggatcacctgaggtcaggagttcaagaccagcatggccaacatggtgaaacccaatctctactgaaaatacaaaaaaattagctgagcgtggtggcgggtgcctgtaatcccagctactagggaggctgaggcaggagaattgcttgaacctgggaggcggaggttgcagtgagctgagatcgtgccactgcactccagcctgggtgacaaaagcaaaagtctgtctcaaaaacaaacaataaacaaacaactcttcctttgaaagttttgttttgttgtttttgttttttttttgagacggaatcttgctctgtcacccaggctggagtgcagtggcgtgatctcagctcactacaacctccgcctcccgggttcaggcagttctctgcctcagcctccctagtagctgggattacaggtgcccgccaccatgcccagccaatttttgtatttgtagcagagatgggggtttttaccatgttggccaggatggtctcgaacacctgacctcacatgatctgctcatctggacctcctaaagtgctgggattacaggcgtgagccaccgcaccagccagaaggtttttttttttttttttttttgaaacggagtctcgcactgttgcccaggctggagcacagtggcacgatctcggctcactgcaagctctgcctccccggttcacgccattctcctgcctcagcctcccgagtagctgggactacaggcacgcactgccacacccggctaatttttgtatttttagtagagatggggtttcaccacattggccaggctagtcttgaactcctgacctcgtcgtccacccaccttggcctcccaaagtgctgggattacaggcatgggccaccacgcccagcctactgttcatctttaccttgtgtaatgccagtttaagacgcaaatgcaggtcgggtgcagtggctcactcctgtcattccagtgctttggaaggacaaggtgggcagatcacttgagcccaggagaccagcctgggcaacatggagaaaccccatctctacaaaaatacaaaaattagctgggtgtggtagtgtgcctgtaggcccagctactctagaggctgagaggggaggatcacttgagcagcctgggaggcagagattgcagtgaactatgatgatgctaccgcactcagcctgggtgacagagtgagaccttgtctctttaaaaaatcataaaatgcaaatgtaagagtgtttaacttgtggaatcatcaaaattgcacagttcttgatttgaaccccaaatataataattaaagtgcgtgtgcattttattcttaccacatcagggcaaacgctgcccaaaatgaacctggctgttggagttcgcttaactcacccatgtggccacgcagctctcgctctgagtgaggacagactgcgtgtgggggctgtgggcgcctgtctccctccctcccaaggctccggtcgtgggctagtgggagaaagtgactgggtgggaccaacgcgacctcctccactggacgctctttacacgggctgggaatggcagtgggcttgcatgtggcgtgtgccacctctgctcatgcatgctctgtggtcacggagaactttgcttataaaagaacatcttatcaaaggtgaaactgttcagaatgccaatgatggggacagagcgttaagcccaggacatggctgcgtgcccacaaagccagctctggatggaaaagtaacgagtggagggcgttttcttcccagacccggtggtccagccgtgagtgtccagctgcaggccccacagcagccagctctgggcgaaaatctagagggcccctgcgcaccctcccgcccggggtgccctggcccagggtgcacctgtgctctggaccctgggccgtgcggggctccagggcgcctggagactgccattttgtgtgggaaggtggaggcgacttgggaatgcgtttctttagattttaaagatgagagagtgttggccttggacaggaaaaattccaatttggtgagaaatggaaatatccaattttttttttttttttgagactgagtctggctctgtcgcccaggctggagggcagtggcgcgatctcggctcactgcaagctccgcctcccgggttcacgccattctcctgcctcagcctcccgagtagctgggactacaggtgcccgccaccacgcccagctaattttttgtatttttagtagagacggggtttcactgtgttagccaggatggataatgtccaaatgttttatccaagtccaaatagcagtgttggtggtaggtgtgctctgcctgtgggtgggggtggtctctgtctcaaggtgggctacgagggtctgccgcagggggggtgtggacgggtcttgcatgcgtcaccttccctgtgtggggcgtgggggtggtctccccctagaaggacagggcttgtggcagccgtgagatggatggattcccagggatctcccctcaccttgggggatgagcccaggctcctttctggggtctccagtgtgtccccgatggaccagcttcctgcatggcaccgccctccggccccaccccgagccctgagccccgccttgagccctgggcgctcctggccctggcctggcactcaagggctgctttcagggctgtttctcgtctgtcttttttcttttctttcttttttttttttcttccttgagacggagtttcactcttgttgcccaggctggactgcaatggcacgatctcggctcaccccaacctccacctcccgggttcaagtgattctcctgcctcagcctcccaagtagctgggatcacaggcgtgtgccaccacgcctggctaatttttgtatttagtagagatggggtttctccacatgggccaggctggtctcgaacttctgacctcaggtgatccacccgcctcagcctcccaaatagctgggattacaggtgtgcaccaccattcccagctaatttttgtatttttagtagagacagggtttctccacatgggccaggctggtctctaactcctaacctcaggtgatctacctgacttggtctcccaaagtgctgagattacaggcatgagccactgtgcccagcagggctgtttacttaaaggtacatgttccgatccctgaattcggttttattttgaggttaggagtgagaacacgattggttgtcgtcgtttcctgtgggagtggctcttttcagaggcagacagttgtctttgctcgtgcgtgcacatttgtttgcatgcgcgtgagacccccaggtggttttgctctgggagtcgtgggatgtgttctctgctcccttcccttgtcctgagtggccttggttggccacagagtcagctggcagtggctgtctgtgggtcacctccacacatggatgaaactagcctgaggtgggctgttgttggcctgctggcatttttggggtcatggcagtgccctcaggctggtgatagtgggggtggggaccttgtctcaggtaccaagttcgtcttcatcctttgatcccctcttccaaaaactaccccctccccccgccacgtgtgtgaggcctgcagtggtgtgcacagaagccacccttgggcctgctgggtgacaggtcccctccaggtgacgggagctgcctcgctcttcctgcaggtccccggtgccgcctggttttcccgaatcgcatgcacctgtcactgagctgtcagtgtggtcagcttgctgcacccacccgggaagtggagctgggggaaggtcatgttctgcaggagacctggtggctcaggccctcaggacccagctgcccctccccgaggagcagtggttggtgagaaagcacacagaaggcagaggctagagatgcagctcctctgttatgttgagcctctctaggcagggagctcagagacccggaggtggccctcctgcctcctctctgtcaggacttgacacctgtctcagtggccatggctgtttgtcttcatccctcttcggtgagggtggcaggcggccagatgcccattacaggccacctctcctgccagccagtcttcgagggctggtcaccacgtggccactttgtgaggcccctcctctaagatcaaatgtggcactgcagagctacaccaaccccgagccccgcgcagggcagggcaggagaaccaagatcgtgggggtgggggggtgcagggcagggcaggagaaccaagatcggggtgggggtgcagggcagggcaggagaaccaagatcgtgggggtgggggggtgcagggcagggcaggagaaccaagatcgtgggggtgggggtgcagcacaggtcgtgctcccggggctggctgtagcggctctcccctcccccgagcccaccgtgtgcttcttgtccagccttttgagatgaccacagctctcagtttggccccacagcagcatctgggttgacgtccctgatgaggtttggaaacagcagagaaggggttgtcctcttccaccaagagcctggctggcctggcctccctctgggcagcacctggctgggctgactgggcagagggaaggggtggcctggccagggtgagcatggggtgcttgccactccacagagggggtgcaggaggcgcctccaggccacgttgctccaggacatgccacctccacagccccctccttggagtctttcctcaaggtcttaggatggctgtttgtgccctagcacagagacccttgccctcttgtgtggcgccgggggtccctgttggtcagggatgttcctagagtggggagggagtcggtaaggcaagggtgatgttggttgtaaggggtggagtccttggtcttaagagatcaggcagggcagccctgggctgcccccggcagagcctttgccccaggcaagtcccggggctcctgggaagaggctacttctcagcctcttgagagggcctccagggcacaggcagggagcagctgtgagggtgtggctgtgatggggactcttgactgcagtgtggatgtgagctgattgggggtaggccagccttctgtgcgggacacttgggaactgaggggacacagccgccaccctgcactgctcagcctgagcacctctctggctgtttggtgctgcacgtgtttctgggcatctgagatgaggccccagggcctttgcttccagacaccaggggagagagaccagccccagaacaacagttggcgggtgggctggggtcgtcagagcttctgacctcatcaggggctcccccagagttttctgtgcgctgccgtgtgtctgggccagcgctgggggcaagcgatgccttctgtggtttgaggtcttgtaggcaggaggaggaggaggaagagggcacctgctgagatacttcactggtctgagggccccttctgccccagctagcgcttgggtgagggttgggcttgcggagccgtcctgtaaagccggggatggcaggacgcattgtcaccccctcctgccgctcttacgaaacactcttaattgagtccgattcttggtgaatcagccttccaagaaccgcgaccgcagcatcctgtgccgcttctgtgttccgcatttttctctttctgcagcgtttcctctcattctggatggaaaggcctgtttgtctccctcaatctttggcgagggtggcaggcagccaggcggccattacgggccgcgcctcccaccagccagtcgctggcaggagcgtccggggagggagcagaccccgttcaccctcaccccagaactgaagcagcgaggggacccagacgagctgcgaatgcaggcgctggggatgctcatgccagcttgctgttcttgggagtctgtttattcttttaagctatttcagcatttaccttcagtagcatcggaggaaaagaacgatacattcgccccagtgtgtcccctgggggacctctggctaattttcggattccgaaagtgaggttttgcagggctgtgtggccactcctttgtggtcggccccagtgtcatcaggctggtttcaaatctggggtctgtggttcgaggctgagtgcagggctcaggctggatggggagggtgagaagagtggggccagacttcccggggtcagcacacacatctagggtcgtcatggagcccatggcagcactgcctggccattggcccctggtggacgcctcagaccgaggtcccaggagaaccccagcaaggttggggctgcagagggagccctccccgggacagcagctggaccagaacagaagctgggccctcccccaccccctcagtctctgcagcccccaccctccttccagcaccttcccccctggatggatgggtctttgtgttttgatgccccttggctctggcattgtgggggggccccctggggcatgaggaagagggccagtgccaaggccccgagggagcgctactaattgctactcagtttccttagaaagatttggctttttgtcatcaacagcgctaaagtaacagcaaagatgacctacttaagcgaaagaaaaatccgagtgaacctttaaagctggtattctcacttcattttggggcttggggttgtcttgcagattcaatctgtttcctctgtgccacaataatcagaaaataggttaatttaagcccaatatgaaaagtgaattatcatgtgtgaaatattaatggcacttacaaaaatagctttataatttcttgaaccgtgaaatcttcagagaaggcccatagctcacgtgagccgattcttgagtgagggtatttgggggtgcacctggaggagacagcgatggtctcagcagggtttgtctctagagtgcctcagcgcgagcttctgccagtccccggagaggagtccccacgcctccttgccctgctcagggctgcacgggagttgccacgtaggagagcacagcccaccttgggcttttggggttcgggcttttggagtttgtccaggctttggggtggggctttgcctgtagaagctctgagctgtgctgcatggtagggtgaccgcagtgggctgccctgggtgccccatgaaggactgagcagtggggtgacccttcatctagcagacgttcatcagggacctgctgtgggccaggctggggtcacactcagaactgactgcagccaggtggagaccccacctcgagagctcctccttcctagctgtgtagcccacaccccctggggagccgtagcagtgtgggggcagctctgatggaggggtgtgtacctggccacagctgtctctgggctgtggtcatcacccacaggtccttttcagatgcggtgcccacctgggtgtgtggacatgacccttgcctaagggagggagagaggaaggcctggtaccaggcagtgtcctctgcctgtgcccctgctggggaggacgtgagggcctgtggcttttaggaaccttgaggaggtgggggtggtcttctgacgccggcggggctcctgaaggtgcaggaaggcacagtttgtgcagagtccccttcggaggaagcaacgcctgtccctggcggggccgctgagccaaaggccgtgtctcagtggcaccctctcccagccgaggatgtcggcaccatttgggcccgtggacttcctccagtctctgggtggtggtgagtggggcctgctgttgtctagcagccactgttctgtggggcttcactcctgggcagggtgcacgggagagcaggggttggcaggaacccggcaaatttgtcaataaacctgaacctgaagtcccacaaggacggaggctcagtagggctcgggcctgagcggggcaggccagtgtgagctgggggttggggcaggccactgtgcggagcggggttctggccaccacagggcttttgttctgttgctttggttggcgatcgggactcaccatgttagacctgaggttcgtggtgggatccaccggcgtggccctgggtggctgccctgtgtgctcagggagcagtcacgggccctgagtggtgttgcccgtgggcctggaaggtccagccgagggttggggcctgcggatgtcgcttctctgaagatgagaagccagggcgaggcccccccccaacatctggaaggttctcctgcgtcgccctctccttccaggcacatttggccgtccccttttctgcgtgtctgtccccaccatcgtgccctcttcttctctggactgcgtttggatgatttctttgaacggtttttattctggaaagttctgctcgagcatctggtatctccctggtgtttgggatgtctccttctcattcccccgtgtcttgctttaagctgcgtgtcctcgtgtttccgctgcccctgttcttgggcactgcgttgtgttctgtctgggatccccgtgcaaggcccctgggtctggtggctgctgcccggcctctgggaccgtctacctgtcccagcccccgtttccccgcttcttcagctggcaccttgaaactccgtgccaggtgagcaggcctgtggctgcaggttcccggaatctgtcgtgggttctgggttgtcccttccagtgcaggcggtggtcaccgcgccaccatgggggtccaggcagcaggatggtcatgtgatgggggccactctgggcttttcattctcctttcatctgtggcctcggaggctccccatgttttctgaggtgcacagaacatggaggggtgctcatctcatgtcagatattggaaggatgtcgtgcaggaaggttcgagggtctcggggtggtcctgagaagccgatgtgataggtgcggcagcttcctcttcccctgagcgggggcttccagagcctccctcccactggtgcccatggggtttgagcctgatagctccgcaggattcagctgctgtgagtcacagccaggatggagaggtctaaggcaggcctgatgccgggcagggcgacatttctagaaaaggtttcatctggtgatctgctaaatggcatgaaaatcacaaaattggcactcagtgaccatcaggctggctgtgtgtggctgctctcctcaacaagcaaatggctgcccccatccagagccccgactcccgctggcctcccccgtgcggggatgtggggaccagggcaggccccagagaccacctgacctctctggcaggaagaagaccacgtcgtgccgtttcctcctcccttgagcccgttagctgtctcggggaaccggtaagcccagggccaccttgtcacgtcctccactgaacgtgggtccacgtagatgccagccccttggtcttgcccagaagttgtgggaggtgctggttgccagggatggctatgcatgtttgtccccatggcagggaggcctctgggggcctggccctccccccgctagctgcttctcacatttttgtctccccgagagccacctgctctcccagggccctcaggcccccgtctgccagtctcctggcacctgggctggggtctgcgccaggcaactcccacagcagggcaggatccaccctccacgttatcattactgccatcccctgtgcctgggttggaggccacgcccacccagtggggcccctctggaaaggagacttgacctcagggtggtggcagggctctgtgggatgcccctggtgacagggaccagaatgttccctaaagtggatgtcaggcccctggctcagatggagctttctgttcttgatgggctttagaaggtgaaaaactaggcttccagaggtgaagttgcactgtgggctttgtggcaggtgagcgctgcctgaccctgaacagctgctaaagactcagacctggagccttcctggtgtcctgtgtgtccacgcaggtgtgccagtgtggcagccctgcgccaggagctgcccctgcatgtcatggcagcatccatgccagccgagcgcccctctggctcccaggcatctcatcctgtctggctctgagggccgtgctgcagtgaaaaccattcaccttgacagtttggctttcgaccaagaattcactgtcatatttttgatttttaaaattaagactgtattcagatataatttgcgtaccataaaattcttccttccacagaatatggtttaatggtttttcagtatatgcagccatcatcatctaagttgagaacatttttgtcacccccaacaagaagccccatgcacatggtccgtcactccccaggccccaaatcccagccagcactgatcttggccattggcctgtcctggtcattccatagaagtagagccacgtgactgtgtgtgtgtctgggccacgcgtggctgtgtgtatgagagccatgcgtgactgtgtccgggtcacacgtgactgtgtgtccgggccacgtgtggctatgtgtccaggccacgtgtgactgtgtgtgtccggcctcagcacagtattttcaaggctccttccttccttttcatgactgaatcatactccattgtctgcacagaccacaatctatcccgtcatttgtctctggatgcttgggtggctgcactttgctgctgtgagcacttgtgcacaagctgtcgtgtggatgtgtgttttcagtaacctgcgtgtacgccgaggactggaattgctgggcgatgtaactgtgttaagcttccgaggacctgccagactgttttccacagcagctaaataattgtacgttcctcttagcaatgcataggggttcctgtgtctccatgtcatcaccaacacttgtccaaactaaaaaattctaggccaggcgctcatgcctgtagtcccagcaatttgggaggccaaggtgggcagattgcatgagttcaggagttcaggaccagccagggcaacaaagtgaaaccttgtctctaggaaaaaaaacaaaaaaaaaaaaacaaaaaattagctgggcatggtggcacatgcttgtagtcccagctactcaggaggctgaggtaggaggattgcttgagccctgggtggttgaggctgcagtgagctgagatcgtgccactacactccagcctgggtgacagagcaagactccgtctcaaaaacaaacaaacccagttctagccatcgttgtgggcgtgagttgacgtctccctgcggtgtgattgcgtttccacagtgaatgatgtcaggcagctttgcatgcggttactggatgttagtatcctgtttggagaaatggctactcgaattctctcccatttggaaattgggttgtgttttgtgttttccttgctgacttgcagagttcttcatgtgttctgaatctggtcccttaccagctaccgggtttgcacgttttcccttgcatcctgtgggctgtcttttccctttctcgatggtgtcctttgaagcacaaagacgtcgtgattgttttctgggaagccttgttgttgtgttttctctctgttccttgtgctttggtgtcatggaagcacttctgcgggggcgggagtctggactgaggccgccacgttcctgctgtgaaaaccttcacgtgcgctcgcagcctcggctctacagacggttcagtccgggaaatggtttaaggaggccgtgcacagaaacagtctttgcagccagggacatgagagcataccgtgctgttcccacaaggcccgtggcctctgcaggtgagaattggtggcctcccttgaaaatactgaatggaggtgccaggcacccgcacaggctcttggtgtgggcataggccgtcttccacttgaagaatgtggcaagatggtctgaaaaccacaaagtttgtgtttggagacacggtctcagtgtgttgctcaggctggagtgtagtggtgggatcatacctcactgcagcctcgaccttttgaggtccagtgatcctcccacctcagcctcccaaggagctggcattacaggcataagccaccacgccgggcccacggctgaagtttgggttgtatccttttaaggaatagcagacgggttttcagccacaccgaagagaacctcagcgtagcagagtgttgctgggccatgtgcttcaggagcagggccacaggcaggacctcgagtgcccagcccgctcaccacgctgtgggcggcctcttgggaatgtcagaacaccagcacaggcgatctcctcggaacccagattgtgggcgatcctgccgctccacctgctgtggccccagggttgcaccaccatgtggactgtggctggcagcttctggaggcttcttggtgcctacaacatctgcgccactccacagcgttgcctattggtggcagccatcccctccataagcccgtggcccctgtacagagacgaattggcgctcacggactcaccctgcgaggcagcatctgcgtctgcaggacttcccggcccttggccgcacatttccctccagttcccatcatggcagctgtgcctggttgcggatgctgcatgctgaggagaggaggcgtgggcccgcccggtgtgcatgggcaggtctgagactggccactcccatggcgcatgcattcccctggagggtccccttgccccgtggctgcagcctggcaggagaagacgctgaggggacgcacgggaggggttgcagggtgggctgtgctgtgtggcaggccttggggtgtagccgcaagctgtgggtccatccccccgcaccagagtgcagttttgacaccgggtggtcatgggccgagcatccatgcaggtgtggagacggaagcctgacccacagagcttggtggtggcccctggactgacctgtgggctgctcaaccgctctgccactgtgcgttgttcacatgtgaagccggcgtcacaaaggcctcaatgtctgtttcagctggatacatgcgcgccctcgtgggggcttgagggcacactggccgctggacactggggtcccggggtgactgaggctggtgccctcctgacaggttgctgggctgcaagttgaacagaaaactggttttcttcactctgcgaagttccctgtggttgtccctggggttggagggagttgtgttgacatcatcatggctgctgctgtgcgcctctcccttggagcaggtgtggtccccggctcctggattggctgcccatgctcaggatggtctggggtgtggccgtggcctgtccccgggccggatggctttctcagcagctccctgaggcagcatgagcagaggcgggaccctgcccgggtcctgtttcccccttgtatcctttggccctaatacggggtcccgtttaccaatgagggcaaagagaccagtctaaggggaggctgaaaactcacaggcaggcctgtctggccttggggtctgggtgctgcttccaggcagaccacatcccaggtgaggtgcagacattcagagacagacgtggccgatcctggctgctgtatcaacgcgcccaccaaatggggccttctttgatcatcagtcaaaagcaagaatgtgcctgtggtgggcgggcgcgtgtgccagcttccaggccgtgggctccttggtgcccagagctcaccctgtggtgcttgcccactactcactcccgcctccccggagtcttgccctggggggtcctggtgtgggagctgccttctctagttgggtggagccttgcctgctggtgcctgtgagccctgggtgggtggatgccgggtggtcgtggaggttcacagcaggctctatgtggttgttttgtgtggatttggggtgtgaattctctcagcaaaggctgactcagaccccagtgttcagaaggttcaaggaagcgaccgtcagcgccgagtggccagcagggcggggatgcggcgttgagccccgtcattcagcttcagtgtggagaaggcccggagctgtgggcatcagctcggggacccgagtgactgtccctgcctcggggagggggggggccacacgggcaggcggggcagcagcttgtgcccatgtcctcctcacggactctggaagtgagaggcgctgaggccacagtgggggaagtggcccagctgacgacccgggctctcggtgccctgggaggagctgttgttaggacatgtgcagactgggttcagcctgtctggagtggctcaggtgcctggggacagaggccagctgtaaccgctgctgcactcggttctggattcagtgccctccgcctctgcggcgtctccctcggcagctgtccaggactccagcctccctgccagggtaggggacatggagcgtctccttgctctggggggttgaggtcttctgtgtttggaccctgtgggatctggcaggagaagcagcccccactcatgttgtgccaggggcctggggaagggagatggcagttctgtgacctccagactccctttccttattgcaggggatgggccagcgtttcgccctgagcatctgcacgtgtcaggcaggaaagggtccccaaggccttctcaatggctcttctctgttcctggcaccttacaggcctgaaacgcagggcccccaagggtggggtgtgcatttttggagagcgtcttttctgagactcccccatggggagctggtggcttgcttgtggcagtgtactgtggctgcccagtcctcggcaggcatccactgctggctcacctgtttgggccaccgcctctgcataggtcctgtgggctttgctcaggaactgttccgtcagagggcctagggtgtccacagtcttgggcccgctattcctcagcccagccctgccctgccctggcaggggggcacctgtccttgggtgcaagctcacacgcgttgcccgggtgcctgctggccaggtagcttgcctggtcatcctcggggtgtggggaaggaccccaggaggggaagtggccgcggggcagcgcggtgtgtcgtctggcctccgctgtgtaagctgacagtggcctgaagggctttgggatggggcagccccttgcaggcctatccaggcccagccccattgctttggtgtgtcaggtccagagccgtgctcctgcctcgtggcctgtgggctccaagggcgggttttgaagccccaggaagggtcacaccagaggcaagcggtcgtagctgctcttcccagagtaagactcagccgtctgtcactgggtgtggttttgtccctgaccgacagctgacactggggcccccaggggccttggtagggcgggtggcatcccaggcctgaagacggctgtctgcttcctggggctttgagaaaccaatactgctcaggtgacagtccctctgagagtgtcacttcctccgcccacaggggcgcagacaccttctattttacacgtttctctccgtttctctgatgctgcagagagcccgccctgagagccgggagtcgcctgatgaggggtcggcaggggtcttaacggagtcatgtctccgaaggctcgtcctggctccctgaagaccaggagcgtccctggccccaaggatggccctgagcccatctgcctcaaccctccagatctgcagggtcctcggccaccccccactgagcggattgggctcggggccccgggcctacggtcctcccgccacctccacggggcggctgttggggccccaccaggcagagccgtgttctcaggcgttggctctcatggaggtggcctgaggcatctgactctttcccctcaaggagtctctgagtctcccggagtcagcgccggctgttgtggcttttccccgggtgataactgagccgaatttccgcgcccgcttcagtggctgcttagacaggaagctccacccagccgggcgtcctcggccttctgtgcctctcgggagggtccgcatgattccggaaggggctctgctgcagctaggatggcacccgcccctgccaggcataggcacagcaccctgcggtcagggcctccgccagacgtcatcaacactcacttcccctcgaaagccgccacatagagggggtattttcagtgtcttttttcctgaacagctattttagtgtctctgaaaaaaaccatccacagccgtgagccttcaggggctgcctgccctgcgtccccggccctgtgcgcccgagcacttatctttctcccttgggcccaggtcagagccaggcacctgcccctcccctggccccaccctgcttgttccctgagggctgcagggtgggtgcacgtgctgcaggggaggccacgggctttggccagatcttcccccagggccctccatccccataattggagcaccttgatggacagcctgccctgcgccccatcttccccctagggaagcagggtccctgctgcctccaggaggctggttcctgatgcagcgtcttctcctagagtcctggaggtgggaagagcccccggccctgagtgtgctctgtccaccaaggcttcctggctgagggcaagggcggagcccccaccgcccgactttgctgcctcctcttgaggttggcctcggcagagtgagtgggacctcacccctgtgaagggccccttgccctgtgtggcctgttctgcattggcctgtggtgtagacctggtgccagctgccctggagactctgtgctgtcctgtggggtctttggcagtagaggaatggcccattttacggagactgccctgtgattttgcttgggaagagaccttgggtctcagttgtgccttgcgggcagcaccgtctcaggggtttccagccgcagggctgtgggagttcacgtttgcctgaggctggatgtaccggctcaggcccccagcacacaacccacatcactcactggctcttgggggatgtgcctcagcacctgacacacaacacctggttctgagtgggctgggtccaggcaccttcgctaagcttcctccaccagcgggacctggttctgggtgggctgggtctgggcaccttcgctaagcttcctccagcaccggggctggcaaggagcgaggcaaaggtgtgtgtggtgccatcctgtaggagccaggctccttggggatggtgtccttcattttgaaaatgtttccttcccatggggagggggcagccagaatgcccactctttaatgcacctgtgccagtggcccacagggacacggtgtcccctccccgcgaccacccctgtgccgcagctgcccttcccagacgcatccgtcgtgagtggctctcgccgtgctgtggctggttgagctgagtgcccagcgctgggcaccctctgaggacacactcgggttctaggaaaggggtttggcaggagaaggacgagggactcctggccaggctgagccgctgtggaaggggagagtgggtcttggtgctccatcccaaacctgctgcagccgtgggtgaggtcacccggaatggcaggacaaggtccactctgttctctcggagatgacttgtccctcagcacagcctccacgtgcctgttgcgcgtggcctaagggcctttatgcaaagtgaacttggtctcctggggggtgccctggaatctgccttctgcgccactcagggtcgtttgtggccggagtgcatggggctctgactgccatgtgccagccacggggctggtggagggaccctgccctgggaaccacaggtgccaacaaaacctttcattgatcgcaggtctcctctgagcctccggcctccataagacccaaaacagatgacacctcttcccagtcccccgcgccttccgaaaaggacaagccgtccagctggctgcggaccttggccggctcttccaataaggtgctgtggggcctgtcggggtccttggggtggtgggtactgggcccttctccttgggcagacccagcggctggcagctccacctgcccgctactgagggctggcacccggcgcagcctcagggacatgaagtggcttgtttttctcctggtcactcacacagacaactctttctcgacagagcctgggctgtgttcaccctcgccagcgcctctctgctttccgaccctggtcccccgcagtgtcagcgagtgagaaagagctctccccacacctcccggccctcatccgagacaggtgagtgggcgccattcacaggtgtttctgatcacgggggaggctccacgagggctgtgcatgcggacgcgcccatgtttctgcaggctgggtgcccagacctgccgccttttggtcagggcagtctcggtgttggttcctttggctggcatcagggagagcacacctagagcgttccctgtgttctgggtggagtcgtgggtggagccctgtctgctgggcgcagcttcttgatgtgttggcctgtgtctggccttcgcaagagacccagcaagcagaaaacgcttacgggttcttagggaactgtaagcttgacttgaagattcggagctgggaaagtctttcctgtttaacaccttcagagggggtgtgcgccaggatgtgtctgggtggtgcttggggacagaggcaccttcccgacacccgcctgcccctccagcttctactcctacaagagctttgagacagccgtggcgcccaacgtggccctcgcaccgccggcccagcagaaggttgtgagcagccctccgtgtgccgccgccgtctcccgggcccccgagcctctcgccacttgcacccagcctcggaagcggaagctgactgtggacaccccaggagccccagagacgctggcgcccgtggctgccccagaggaggacaaggactcggaggcggaggtggaagttgaaagcagggaggaatgtacgtgtgagtcgctttctgtgcctcctccctgtgggctgtgggggtggcactggctgaggggggctggtcgccgggggtgcgttggtggccccatgtttcgcaggttcctccgggagcggcgcgtctccctggtgtggagctgccgggcacttccatgactttgtttctgtctctgcttcctcctcagtcacctcctccttgtcctcgctctcttccccgtcctttacctcatccagctccgccaaggacctgggctccccgggtgcgcgtgccctgccctcggccgtccctgatgctgcggcccctgccgacgcccccagtgggctggaggcggagctggagcacctgcggcaggcactggagggcggcctggacaccaaggaagccaaagagaagttcctgcatgaggtggtcaagatgcgcgtgaagcaggaggagaagctcagcgcagccctgcaggccaagcgcagcctccaccaggtgagcggggcgagtggtgctgggaggtccagggcacgggcagtgagcacagcctgcaccaggtgaacgggcacaggtggtgcctcctcccttcctggctgccccatgcgctcctctctgcctccacctcagtgggcctgcctgggaccttgggggtccgtctcccaaaagctgcagccctgggtatggtgagcccctcagtgtccccaggctgatggacatcccaggaggccactacatttggcttgaccacagctttccccatcaggatcacacaccctgcgtggtggccccactgaggaagtagccatgtttctctggtataagggaggccgggctatttttagtggcagaaagagttgggagcagctgcatggagacagttccttgctctgtgtgctccaggagtgggtgttcacgcgctccgccagcaagacctggcgtctgcaaaacacaggcgtgaggggcgtgcttactaatgcctggtgttccagaaggcggctcccgccaggcctcccgagtaggaaggagagggctcggcccgcacagacacacacacacccacctgcacacgctgcttctctgggctctgcctcacggttctcacgctgcagctccggtctcgcgcctccttttacgttgtttaggtttctttctgacatgactgagggaagtgcggttcacaggcagagctgcctggggagagaggtgtgcaggcggcccgttgttcaccgggccccggcctcgctaaattcacacctcggcggcgtctggcagcttccgcggcgtgggctttagcacaacacaaccccgtcggccctcagagctgcagggttgccgacgtgccctcctgcgcgtgccagtccctcgccccagcacgtcccccgccactgttgtccttgattctggttggaggtgtgatttcccacatacatattcatgtggtgtgtttgcagcgtggggtgtgagtcacacggatattttaatggggagagtgggggggcttgcggaggcgccgggcggatggacgtgtccatctggctgcgtggggagacccggggccctcagatggtgcgatgtctgaggctgccctcctcacattgatgggagccagggcctacttggcttgctgcccccaaggggaacgtggccctagataccgggggaggccccgccgcagcctcaagtgactgactcaggcccccaggtttagcacagctgccacaggcctggcggaaactccggatgggggtctgaaaagcctttgtggggtcggggcaccacacgggttgggctgatggcgcgctgggggcggggctccagggcacattgtcagatagatgaccccacggggtgggctgaggactgctggtcatggtgaggggtgtgctgggaccggctgggcagtgaccccgagccgcctccggcccccaggagctggagttcctacgcgtggccaagaaggagaagctgcgggaggccacggaggccaagcgtaacctgcggaaggagatcgagcgtctccgcgccgagaacgagaagaagatgaaagaggccaacgagtcacggctgcgcctgaagcgggagctggagcaggcgcggcaggcccgggtgtgcgacaagggctgcgaggcgggccgcctgcgcgccaagtactcggcccaggtatgcgggtggggagactgaggcacgcagcacggtgggcgtggagccgccgtgggccccggtggccagtcctgcccagccggaaaggccttggagcagaagccaggcccgggaccacgttccgtgcgtgcccccccgacgggcacagggtgggtggttgctgggccctgcgtctcgtgagcctgtgtcctagcaggtggaggaggggccggcacgcggcactggggagggacagggagcggcgcaggagcctcgggtgggggaagcagcgtcgggccggggcagggcagcgagcaggcgccgctgaccactcggctccctttcagatcgaagacctgcaggtgaagctgcagcacgcggaggcggaccgggagcagctgcgggccgacctgctgcgggagcgcgaggcccgggagcacctggagaaggtggtgaaggagctgcaggaacagctgtggccgcgggcccgccccgaggctgcgggcagcgagggcgctgcggagctggagccgtagattccgtgcctgccgccgcagcgccgccgacaacgcgggtgcaggggggcgcggctgggcggtgcagctccgcccggctccgcccctgcagcccacacagcacaacgtcttaccgtgcctattaccaagcgagtgtttgtaaccatgtagttttggaacccactgcaaaattttctactggccaagttcaagtgagtaagccgcgtcccccaactacagctggagacggggccagctcggcggcctgctggtcctctgcttgctggaacattctaacatttacacttttgttataagctatttaaaaccagtaaggagacttgaaattcagaaaatcaacacatttttaaatgactaacttctaaaagccccaacacatgacgccatctgaagacccgcaacggagtgggggtggcggccgccccaccctccccacccggggaagccatcacagctcatctgcccgcggctgcgtgaggacagcaggggtttttcttcagagtctattttttcagcgacaaggacccaggtcttcctgctgctgccagggagagcagggacagtgccgcgtgcgagatgagctcgaacactgcccgccttactgccgcctaccccgcccgccacgccgccgtcgatgccagcgctgtccccacgggtaccaggaagtgcagagccgcacaggagctgccccggagctgaggggacggtcttcggctcctctgcaccccgtgattctgcccacgctcctccaccacgaggcactgacctgcgtcgggtggtgaccgtggctggcggtcacgccctcagcccctccgggcacacgtgccgcctgaccgggcgacccttttcagttcggcaaacgtcgctcccttcattttgggactgaggctgcagcattggaacaaaagagcattatttcaatttttctttctttttttttgttcgttcatttaaacgtatatttagaactgcactttgtccacaaccttcccttctctttctattccccagtgaactgaggtttttaccgatttatagagcagtcaaatccgaagtgctcgagtgcttagaaaccccctctggtgcttggttgaacaagggaatcacaagaaaacgaaaatgcaaaaactgaacttcgggggtcgttctgtgccttccagcatcttgtacagcaaatcctgactcgtgtctttttacccccaagatatctgtcttcagtagcgactgaatctgccactctcagaataagttccttgcatttattccaaataatctcgtttactctcacctgtttatgcaaattgtataaggtttcttatgcccaagcttgaaaaatgatttcccagtagacaagaggcggctacctatcctacagttacggtatttatttacataagaagatcttacaggagttctttgcttgaatccgttctaacacccgcggcagctgcacgcgctcacagaaggtggaggttacttgcccaggtacagacgacctcggggcagtgacgagcaaagaccagagactgctgagccctcgcatctgggtggcggaattgcctgcggggttttgcccttggtttactgaggggggtcttggttgctgctgaagccccccaccccttctaaagtgcaatgcaaaagggacatcatgtatatgcagcgtttgtttggaattttctttgcttttgttttctttgcggttgttctgtgtgcatggattccacacctctgccgtaggtagatccgtcagcgggcattattaccgtgtcttgtaaagggtcggttttgttatgcaacatgcagaatgctgtttttagccttgttttaccagagttgttttttttttcagttatttcttcaagggaaactaaatgatttagttggagcaaagctttaagtgtgttggcgtgcttctgtgtggctgtcctgtgtcgccaggtcgaagatcacagtgaggtagaggccctgccccatccccagggccgccaggcttgctccgtttgctttgagtttttagaccccagagggagatgagcttttccaagctgtgtctgggccagagcctctccttgcccttgctccatcccgacggtcaccgttgggtccacgcctccaccgccccatcttgccccaaacggaaagcgctgtatctgcagtggcagcccttccccacttcggctctgggagggtccagccagtgtcacctgggcccaccctttcctgcagctgccaggcccgtgcggtcagtgggacccggacgtgggcaggcgagctcgggaccctcccaggcagttcccacagctcttgcctcggctcaccagggtcacttccactgtcaggggcctgagggggcagctgtggctgcagggctgctctggactgaggggtcccaggccccgaggggtgcacgcctggctccccttggcacaggtgcgagtccgtttcttttcagcagaagggggaagaggtgtccgctgtgtgggctgctgactcctctgtgtgtgaggcccttcatctaagtgattgtgtattcagtttaattctcattatatttctatactgaaagaagatttttaacgaagggaaaaacaacagcaataacattcatatctctggagcagctaactcatacacgtaatgtctgcttttcgtacagaactagccaatgtaaaaacagttcacctgtaaatactttttcctttttcaccgttgtattatacatgtatatgctgggtcctttttcagaaactcttttcttacctgagagttgtcttgttttctgggctgtttttaactgaggaaaaaaaaaatgctttcctgccggggggcaggggagacggagaaacccatgtgcgtttcccatgtgaccccctcctccctgtgggtctgagccccggccccccccacctcctcctccctgtgggtccgaaccccggcccccccaccccctcctccctgtgggtccgaaccccggcccccccaccccctcctccctgtgggtccgatccccggccccccccaccccctcctccctgtgggtccgaaccccggccccccccccaccccctcctccctgtgggtccgaaccccggcccccccacccctccctcagcccaccagggtccagggagatgttcgttctcgctttaagtcaggagtcacaaatgacttttttttttcaattaaggaaaaagctccatctctacctttaacatcacccagacccccgcccctgcccgtgccccacgctgctgctaacgacagtatgatgcttactctgctactcggaaactatttttatgtaattaatgtatgctttcttgtttataaatgcctgatttaaaaagaaaagagcttggcatatttatctatttcgctgtgtacctgttagtccttccccgaccccgaaacagatgacattgtacaataaaggactttgagaggaccgcgggacagctgtgcgtgcgcccaccacagcccctccccagaccggccacacacgggcggctgggaccccctcgctttcaggccatcgtgggtgggggtgctgtcacaggtcagattgtgggcctcggagtctccgtcgaccccgagggcacgtggggtccaggcggccgccctggcacaactgccctctcacctagtccccgtcccctctgagctgggcaaggccacggtttcctctgcgattcagggagcttgcagtccctgcttgtagcactggatgtggctggagccctggcttgaggccaccgtggccttgggccggctgggaggaagccccacagagtgcagtgccaggacagaagatgggatggggccttcccggctgggcctccacgggggcctctgaggccgcacctgcggttggccaaggtccagctcccgcacggacagacctgtccccaaggggtggatcgccagctccctgaggagctcctgggttacttgcgggggagaggggaggtggcatcagaaccctggaccccagcgagctgccccgagggagacacagaggtcccttctccccacctgacctcacaggggggccttcccagacccctgttctggggattggaggtgccatgccgcatgccaatttcatggaggcacagccccgggtgggctccctggggtgccaggccaccacctctctaggcttccttaggccatcacatccagcatctccagcccatccaggccctcataggtcatctgggttgtggtccgagaaaggcatgggctggtaggggctccagccggcccctccccccagcctcccggcacaatttccaggtccccatctcttctctccacccctcgggaagtgcccccaagcttggggctagagcagacctggccctcccctcactgccacataggggcttccttcttccctgcccagggccccaaagggctcatagagcccccacggagggtacagggcggcctctagaccacacaggcctaccccagcaggcctcaaaacacccactccacatgggcctggcttctccatccaggctaggcccctgggtgttgggggcagtgggcaggggcgtgggccgaggggaacatgggccacagcaggagtgggtgtggactggtcctgggcacgtgcatgttctggggggcagaggatgggcggctccagagtgccgctggcaggaccctgagactgagtcagttgtgagcacagaggaccagcccggggtccagtgcagtggggaggagttggggaagggctgggccgaggtcctgggtgggcctcgaggaccgtccctgtggccacatgggcactctgcctcggagctgagcaccgcagggcttgatgacggccctcccgaccctcccggagactcaaaggcactgcctccagcagccacgtgggggcagggaggggcggtgctctgggctcagttgttccccaagctgccccaggctt

SEQ ID NO: 549 - DNA, 17132 bp, Homo sapiens
  source 1..17132: mol_type = genomic DNA
atgactttgagtctgtgtggagagtgggaatcccaagacctaaacatcactggggagcagagaaccttctcttgaagaaccacattggccactagaccccaacaggaccaataactgtggccagcaagtcaagtgggacctggtctggggctcacaaccctcattctcaaatgctcatttcatttgccaaacatgctgagtacctactaagtgccaggccctgggtatgcaactgcagacacaacattcccgtgggagagacagaaacacaaaaaagtgaccgggaaatattaacccatgaacaatccagtgatgaaaataaaacagccatggacagagggggatgagggctggcatgaaggcaagcttagaggaggctcaggaggggtgtatgcagggagggaggtaaggcagcctgctctgtggggtggaagcctccggtgacactgagttttctcactgtgtttccatgggttcattggaaacttctaagtgtccacacagtctcccccatgctgagagaaccttggaaagaggctgtggctaagctgaagctgataggaggggagcccctcacccctgggaccagccaggatgcaggcagggacccaagcttgagattcgggagagaaggatactcatgggaaaacctggggccagctggagatgctcagccaccctcttttactttaaaagattttttttctacaggcaggcagggtctccttctcttgcctaggctggagtgcagtggtgcaatcatagctcactgcagcctccctctcctgggctcaagtgatcctcctgcctcagtctcccaagtagctggggccacagctgagcaccaccatgccccagctcactctctctttctctctctctctctctctctctctctctctctctctctctatatatatatatatatatatatatatatatatatatatataattttttttttttggtagagatgggatctatgttgccccagctcttcttttcctaatacctctgctcaggcctgggaggcttctctgtctggttggagcaaagaaggctggtccagggttccctccttagtgtctgccagcctaacttgcatccccaggtgcaagagagcctcaggagggcagagcccggccccaagaccttcaaaccattcccaaggcctcctggctctccctctccccagaagcttaagcgtcctaacctaagtagggccaccaagctctacccatcttcaggactctagaagagaggtgttcatgagcccctggactctggatcaatccttcactcgccttcactcctgcaaagtgggggtccatgtgcccatcctacagatgcagatatgcaggcccaggcaaagtccatggcccttcctggagtcagcagcggaaccgggtctgggcccaccaggaccgcaattgttctccctccttttgatgttcccgagaacagggagtcccctgccgtgaggagcgctggtctcacctatgatcccaaagagcctggtccaggcagcggaaacccagagggtacggcctcccaccaaatccggaccctctccagcctcagtctctggtccgcaacaggagtgaggtgggcccggagctctgagcaccttctcaccggctccaaggcccccgccttctcctcacttttggtctcgggttggggcccggcaggccccgcccagcctccttcacttccttgggccagggccgccgccgcgccgggctctgccctatgtggccgttggattaatatccagatattaagtaaacactaaattagcaaaactacaagaaaattttacagccctttgcatttggcaatcattgagtgttaattagaaattcattacaattaaaaccctgcctaaacagggcctgcgcgccttaattacatctgatttttaattcagaatacgtgtttacacagtaagcgctacgtaccccgtgattatccccaatcctctttatactgtactaattatgtaaattaaacctaattaactgacgaaaactgccgttaattcaactagtaaaagatatgtgcttgcggaggaggcgcgtccgcgcagcctcagcccaagccggagcccaaatggacgccaaacccggggcacggaggcagcgcgggctcggccagtgggaggagaagcgcgcaaggcgcagctcgcatccagagtccggctttccgacccctggtgccaccgggaagcggataaaagagagagaatcttcaataatgggggtcaggaaggccaagggcagcgacgcctgcccgctctggacagggcctcaggacccagagcccccactgaggaagaggagtcccgcccatcccttcggagcctgggttgcggtcccagctctgccactcactgcctgcctgaacctgagcaagtgccctggctgtgccaggccttcctcctctacatcgtctaatgagggcgatactgaaacgcagcactgcgccctccttaccgtcccttcttcaagctaggctctctctgcagcgtgccaagcaccactttttgagtctaggagatcagcttgcgtcccttgtgggctgagggccttggctagggagaagggcaggggttggcttccactgccggatcctcagtttcctgcctgtaaaatgggaataagtggttcctatctattcccagggcccttgttgagaatcggctctgcaatcggtaaagtgcggtccgcggtgatattaacccgccggacgccggcccatagtagagccccagctcctacccccacgacctgctccccggtgcccagccctgagcagcggggcttccccagcctctgtccacgcgcctttctccagctcagaccagggacaggagctgggtgggtctcctggcactggccagagcgcggggagctgtccgtagcttggtgctgaacggggacgcagagtcgacgctgcacaccccctggtgcggggcggtaccctttgtctaagaggtcctgggggccccccgcggccgggctgctggaaacggaggcgtctttggccctcgctgtacaacagaggcaggacaggcaggtcctgctcagggggacccagcccatcctctctttcctcccaccccccggcaccctgggggcgtcctggctccaggatcgttgtcaccaccaggccgaattctgagatgccttttaaaaaatcattaggaggctaagaataattaccgaacgagattgtaattatggggtgggggagcctgggccgagggagagggaatgagctggcggggacttgggggcagctctcggactgggaaggaaaataggttcctgtgttctccccggggaaggtgtgggaggaaagacagcgggatagttggagcgggacagaggcacagcctgggaaagacacccgaatggaggggccagaggcagaaagaaaggggccgagcgggttccaggactcccctgggagaaaagggaaaggcagggagatccgagacagaaagaccggaaccgaggagggggaagagggcaagaacgcgatctaaaagagaccctcagaggagacagagcccacaaacttgggagaggttttcggggcctaggagaacggtaacctacgtcagccagggtagccgggaagaaggcaaaggagtctgtgggctgggcctgccctctcctcagtcccttcaccaggcctgagctatcggttcgcgcttccagagtcccttcccagggtctctgcgagccaggagggaaaggaagagaggggagaagtggaggaaaaggggagacacgccccagaggagttggaacgcaggagggaaaggggaccatacccggtagcccgagggaaaaacgaggcgagaggggagaaggcgaccccgcgctgctacccgcggaagatttatggcgcctcccgggttccaaggacaggctgcgttcgtcgctgctgccaccgccggtagtcgccgtggccgctgcgccccctgcccaggcggcccgtcgcgccccaggccatccctgccattattaacttctgtttgattagggtaattgttcaaacttgggccggacagtatgattaattacagtttaattaacgtgtccattaaggacacttaatgccaggggggcagggagggaggtggtggaagcggccaacggggcgcctgggtgcgggctaagaggggcggggtgcgactagtaactcaaacgaagaagtagagacagattgagagaggaagagaaggggacccagtggggcgttaggggaaagaatggtgaagacggagagaccgactgagacaggaaagggatggagagaaacggagctttgaggagagagaggaggtacccaggggcgtctgtagcatcagaggactggacctcccccttggggaaactggcttagcagcgttgagagcgtagttaacctcagatcactcccaacgatgacttggctcctgccctgggcctgttggtgatggcgaagggaggcattcaaggccgagggctccccaaacctagttcccaagtcccctgcccagggacggaaacaggagaacgcccctcctcaggttagagctctctcttgatacctcccaccgaagtcaggagcatgggagaggcagatctgctccttcccgggtgccatcctcgctgccctgcacccaggtccctgtcccggtctctggtgaccctactggttcccgagggccactctaggctccaccaccctggccctcgcctgcggccggaaagtgaagtactcctccctgcgcccgttcctcttgagtcccccttagccccatcacccggttttggcccagaccaaaactggctccttggccgggagcactgggccctccccacttcgttcttggggacaaactttatggccccagggcctttcctccctcctggcctctccagctagagcgggacgcaggtgcagggtgctggacgcaggtgtgcggccgcttacctggggcgtgcaggccttgggctgcggggaggcggcgggcgccgcgcgtggcccgcgggcgggcggacccggggagggcgctagcgactgcgcgggcggtgggtgtggcgccccggctctcagctgtcaggcgcgcctgccccgccactcgggctgtgaccgcgccgtccccgccgccgcgccatgcgctccaggcttcggcctcttcttccggccagtccccggcctcggggtcaacggctcagggttcgcatctccgcgcccggggtcccggcgccccgtgcccgctgagagcgggaggggccgcgggtgggagcgcggagaaccagggagcacggctgtgcgcgcgcgcggggaggggccgcgccgtcacccggagagcccggcggatcccggactcccgcccgccgctcctcccgccgcgcacctccgctcaccgctcgcccggctccagccgccgccgcactgtgagtacccacgtccggtagcccgccgcccccgcgctctgctcctgcagcttttttttcgtttagttctgatttgggctcctgtggctgttgtttttatgattatacctaaagacaccaccgcctcgctcccaccactgccagtctcccgcttcgctgccctccccaagctcgtccatctagctccgggagccgacgggggttcctcaagctgctctggctgctgctccttgtcgctgcatatggctcttcgcctgtgctttccgctttggcccccgaaattccgttcctttcctagggacccccttcttctgactccgggcccggacccccctcctctcactcagggaaaaccgcgcagggacccaggaccctcaactggggtacgctctcggctcgggcgctgtcttcactgtatgcgggccaggcatagttgccgatttcgagaaaccgagaagctgtcatttcccagcgctgcgcgccctccagccacctccaggagggcgcgaggcttgtcagccggggagttaggacagtgtttttgcctcctacaatgatataaaggacttcaacgcgaaataagggtcaacttattttagttcgatcctcggagataaagatgaaacagacagataatacataaatagcttgatacttgaagaaggtacaaaacagatgagagaaagaggaacgagccggcagagacagctcagggacagataagatcgacaaatgagggtctcctagacaaatagagaagaagggagagagacagataaacagaagattccagtctccttgctgaaggcttttgaactgggatcccctgtctggagctgcccctctgaaaacggagttacattcagggccgactgcaggggaggagccctcagggttgggctgccctggccgcaggagcgcctgcagccttgggccggatgggagcctggcttgtctgaggacatgtggctgggtcaggcgacctagagggccccaaacatcagtccccaagtacccccgctgctgaggtctgcctgcacagctccctccctgcctcagccagaaagcaaagtgcaaggaccagcagcaacttgtgtgcctggagccttgcaatggctacgaagatggctgagattccttctagcccatatgagccgggacagcgaggcatgaaggatactcagagaggtgatgcccctcaaagaggaagcccagagccccgaatcctgcagttggcccgagtgggaaacgtatatctgaaggaggaaagctcaaggagtgggcgactggaagctaagaagtggatcccaacaaagttccttgagaacctctctgtcccacacgttgacctcggtggaaaccagctttggtctggaatacagctaaaaatgcagaaaatgtggttagaactgcaggatcctggtctcactaatagctggaaagaaaacggtttatatatccagccgaaatctttctgctcaacgaacgcgggcgccagccgtgagaggagaagctcgggtttgtggaaactggcaatgttgtcccctgaagccggctcgggcaccaagctgggtgcggtgggggccgcgctaggtccgggtgcgcaccgagcgctttggagagggtcaggttcagcaccgcgaacagcggtagcctccgcctctctccttccctggcagacacggttccctcctccttctcctcacccccctccttctcttcacccccctctaccccctgctgtctggagatgggcagtgaccgcccctcccccctccccacccctccttgcactgcccccgcccgcccgcgtgcatgcgcgactgagcagaggggcggccgatccccgaagtccgggcttcaggacccgggccggcagcaccggctgcgagggttgccgaaggcgcacggatctgggcgctgaaaaagccaggatttggcaatggctttgctgtgtggccttgggcaagtcactctgcgtatctgggtttcacttccttcccaatccgaaaacgggattgggttccttgcagcccgggcattcctgaggtctcctttaccccttctcctcccccaagccccgggggctgttgttaacggcgccaacatgggtctgagtaacaaaagacgcctgtccagggggtgaatgagtttggactccccactgccaagtatcccccgcgcgcccaactcggagcgccctgctgggcgggcccgagcctcggcggcggcgctgaaaatggctcatctgctctctgctttctctatttcgcaggagcggcggcatggaggctctcaccactcagctggggccggggcgcgagggcagttcctcgcccaactccaagcaggagctgcagccgtactcgggctccagcgctctcaaacccaaccaggtgggcgagacgtcgctgtacggggtgcccattgtgtcgctggtcatcgacggccaggagcgcctatgcctggcgcagatctccaacaccctcctcaagaactacagctataatgagatccacaaccgccgcgtggccctgggcatcacgtgcgtgcagtgcacgccggtacagctggagattctgcgtcgggccggggccatgcccatctcgtcgcgccgctgcggcatgatcactaagcgagaggccgaacgcctgtgcaagtcgttcctgggcgagcacaaaccacccaagctgcccgagaacttcgccttcgatgtggtgcacgagtgcgcgtggggctcgcgtggtagcttcatccctgcgcgttacaacagctctcgtgccaagtgcatcaagtgcggctactgcagcatgtacttctcgcccaacaagttcatcttccactcgcaccgaacacccgacgccaagtacacgcagcccgatgccgccaacttcaactcctggcgtcgtcacctcaaactcagtgacaagtcggccacagacgaactgagccatgcttgggaggacgtcaaggccatgtttaatggcggcacgcgcaagcggaccttctccctacaaggaggcggcggaggcggtgccaatggcgggtcgggtgggcaggggaagggtggtgctggcggcggtggcggcggtggcccagggtgcggtgcagagatggccccaggcccgccgccccacaaaagcctgcgctgtggcgaagatgaggctgccgggcctccggggccacctccaccccacccgcagcgcggacttggcctggcgactggagctagtggcccggcgggcccaggagggcccggtggcggcgccggcgtacgaagctacccggtgatcccggtgcccagcaaaggctttgggctcctgcaaaagctgcccccaccacttttcccccatccttacggcttccctacggccttcggcctatgccccaaaaaggacgacccggttttaggcgcgggcgagccaaagggcggtcctggcactgggagcggcggcggcggcgcggggacaggcgggggtgcggggggcccgggagccagccacttgcccccgggggcaggggcgggcccgggcggcggcgccatgttctgggggcatcaaccctccggggcagccaaggacgcagcggcagtggctgcagcggccgccgccgccactgtgtacccgacgtttcccatgttctggccagcagcaggcagcctcccggtaccgtcctaccccgctgctcagagccaagccaaggccgtggcggcagccgtggcggcggcagcggcggcggcagcggcagctgctggcagcggtgccccagagcccctggacggtgccgagccagccaaagagagtggcctcggcgcggaggagcgctgcccgagcgctctgtcccgcgggcccctggacgaagacggcacggacgaggcgctgccaccgcccctggccccgttgcccccgccgcccccgccgcccgcacgcaaaggctcctacgtgtcggccttccggccggtggtcaaggacaccgagagcatcgctaagctctacgggagcgcccgggaggcgtacggcgcggggcctgctcgggggccgggacccggcgctgggagcggcggctacgtgagcccggactttctgagcgagggcagctccagctacaattccgcctcgcccgacgtggacaccgcggacgagcccgaggtggacgtggaatccaaccgcttccccgacgacgaggacgcccaagaggagaccgagcccagcgcacccagcgcagggggcggcccagacggtgaacagcccactggacccccttccgccacctcctctggcgcggacggtcccgcaaactctcccgacggcggcagcccccgcccccggcgccgcctcgggccacccccagctggccggcccgcatttggggacttggcagccgaagacttggtgcggagacctgagaggagcccgccaagcggcggcggcggctacgagctgcgagagccttgcgggcccctaggaggccccgcgccggccaaggtgagccccgcgcccgccccgccagtggcgccttcccacctaccctgtgcgcggcagggctgcggggccgggcggagaacgggaattttgttccgcgcaggcgtgggagcagcaggcctcggccactctccgcaggcccagccttgggcgcgctgcgaaactgggcccacccgcaccctccagtgagggtttcgaagggaagggaagctgggggcggcgggaggactggggaacttgtgtgctttgtttttgttgatgggaatggggaggagaccggctgagactgccagacacagagacagaaaaggggtgtggagaaagaaagaggaggtaagaaaggaacccagagccagagaaaagcgctcgcccgggtgggcatcagagccccaaggaagaggagaagagaggacagtgtggcctctccctgagtcgggccccagcagtaccgggtccccggaatctcccaccaccccaactcgcagttttccgagtctcttcgcactcccgccttgggaaccacagggttcgttgctgggaagctgtctcgggaccgcgtgcggagcgggaggggggctctcaagctggcagggccggggcttgaggggcaggatgcagccaggctggagtcgttggccattttgaaagtgagtgcgcatacctgtacattcggttcattaaaacacgaatcattaaccggatgcgaaaggcgtcatttatgccgcggacggggcactggcgggagggaaaatgcctaaaaggaggcgggtgcagagggtggaggacactttgaacgcccctcggcttgggagccgctttgtgtttagagtaattttcccgagggcgctaacaattaccctgaatctacaagggggcaagggtgcgccgcgtgcgtcactgtgcccgctcaagtccagcgggcgcaccaacctttgccactccgtcggctttccctcttggccgcggggtagggctgggcgtctttgggccgccgcagggcgccaccctaatcgcctgtcatttctcggccgtcgcaggtgttcgcgcccgagagggatgagcacgtgaagagcgcggcggtggcgctggggcccgcggcctcctacgtctgcacccccgaggcccacggtaacgcctgtcgcggccgctggccactgtaatgggggaaccgcagacagagggccggggtcaaggaaggcctgcgaaggaagacaaggagagagacgcagagaaagagggagagggaaagaaaaataatgaaaacaaggaagctaagctagtactcccaacaacttccaatctttagttacttaaaaacaacagtgacaacgccctctccaccacacgcacacacatgctgcagtacacccagacacggcgttaaacccttaacaaaatcacgcccgacacggccttcaaatcctctcatttattcagcaagtgtgtttggccgcggggtcccctttggctaggccggatcggggcggaggatgggggcacatggccgcgcgcttgggtaccccagaagcgccagggtagctgaggcccatcgcggggtggtgggggccgccctgcacttgcgcgccttaccaggttcctcacagaggaggggttgggggcagcggaaaatcgggcaggtcgaggcagccgaaccccggacgatgtccccccacccaccccgaaggtcgcagcctgggccgcgttctcagcaggagtcgggcggacagacccggcggccacgcgcgctcgcggtgccccagtatctgcgcgcgatgtaggtcgctcgtccctggtgggctcggctgctcgcctagctcttttccaaggggctggggcgggggcctgaagcccggagatgagcagaccaggcgcgggggtggggggtgcccggcccaaagcctcagggcgcgctcctgggcgcacagccgggaaccagaggcggccacgacgcttttaattagggctggggcgccccgaccgcggcagctccggcagtatccgggtcacggtttctttgcctctcttgaaattcggtttgttgccttcaagagccagataaggaagacaatcactcgcccgccgatgatttggaaacgaggaaatcctatccagaccaaaggagtatctcccagccaagtcctgcaaatacagacagaggtgagccagcccttgaacccatcgctctccaccgcacccaggagctgggacccaggtcgcccaggttcccagaggcttgcgagaaaggcttttaatcaagtgtaagcggctgccagtcttcttcctcggcgagcagataaatatttaacgcgagcagggtgcaggccaggttttctgaattgctgcctccttggtgggtttgaggttctttcaggtaagggcagaggatgtactaaaaggaaatggagggacgtcctcacccacataaaataggtcaaagggcatttcctgcccttagatggcccatcttccctgggccgtctcctccaggggtcactctcctactctctactgtaatgtcctagaaggtggatagtactggattcctgtaactgtctcctctaaaggcagaaggtctagggtaggtccctgattcgatgtggttcctgggaagctcacccctcccctctcaagggctttcctaggacagaacccctcttacctgcccctgtatcccaggcgaagatgggcttaccttggatgtcacaggaactcatttggtggagaaagatatcgagaacctggccagaggtgaggataaatttgtgaaaaaggtgtacgctgtgcttgagagtgatgggtcattcctgtagaggggtgttatccctgtagggggtgagtgtggaaaagacactcaccaaggccttgggggcatgagttttcctttctttgggtggaaagtaagatcctctggacacattaccctggcacagaggtatgtatgtgtgggtagagcatgggagtaaaacaaacccccagaagtttattggaagtttgggttcccaaggcccgggtctgtctgaatagccttgccagaaagagaaatgagtaacaatgatcagaatttttgatgcctgtggacaatcagacaggacagtctgggtccgctgaattcaatggaaaacaggatttcaatgcaggattgcaggaaagcatttattttaggaatgtgagaggtgttttcctttctcctggcattgaggtataaccacctccaccttaccctaaatggagtgtggatggagcttgtttgcagaatggggatccctgtgttactgctcagcctgtaaggaggagactatggcttggggtgcagagtaggggagtccctagccccactttgcccttctaccttccattcttgcatttcagaggagcctctcctggaggagggcccagataccaatgacctcatggtcagggcagttgccacatctatccctctggagttggttctgagggcactaacagaggcctctacacctagctccctgcccctcaactagcccatagatggtcttgggaatttgtggcaggaggaagacaagcattggtggtcttccattcttcctagttacagatttacagaaaatgccattaccttcaaaatcactggtgctttatagtgagggttcttagcatggatttggcagtcttcagacctcctgaaattgcaggcaaactgttgtatgtgtatttttctgggaaaggtgtccaaggctctgaccaaagcctccctgatttatattgaaagggcggcggtgcgggggggggaggtcggggccggggcgggggcggggtctgtcacttgaagtgggaaatcaagtttccgtgggccagcctcttaggttagggagtgaggaacaacttaaagcagttgcccagctgcatagttcctggagccagggcctagattccaccgtcctgaatttattctcctgggcatcctacccacagcccagtttcttcacccaaatcctttgaatgcagttggtaaagccagagagcggagggcctccacctactggtcatccttctcaactctcctttcagggttgttggccaaggcagaacctgagctccaaataaccctgctttacctcccactttacctcccacttttcccctttcacagaggaattgcaaaaactgctcctggaacaaatggagctccgcaagaagctggaacgggaatttcagagtctcaaaggtacccactgccatcctgcctcaccccacctcatcaccgagccttccaccagggtgccccgacctactccgaaagccgggtgccaggcaactggtactaggtgccctgcaggagacaagaaactgtccttttccagggctgcaggcgaatggctgggtgggagttgggggtaggggtgaaagggggggccaggagtgagaaagtggagccgggagagggggctgtgcgtaacagctctcacttaatcaatttgcacagataattttcaggatcaaatgaagagggaattggcttatcgagaagaaatggtgcaacagctgcaaattgtcagaggtaagacgggagtcaggtgagctcgtgcacgggccgtaactgcctctcgtctggcaggagccgcaatgttggctcagtcatttggatttaaattgaaggtaatttaacaattatttttttatttaatatgctttgtatactctgattagcctcagaatggcaagcgagcccagcaaacggcttgcaggcatcattacatggagtgattgaacttcttatcgcggcaatttccatggtttctaaattaaaaatcgaggcgtaaaattacctgggaagtaatgcctaagtttgctttaattttggttagatccatctgcctttaagcgccatcccaggccatttccttcctccgccagtctgcagttaggagctccggtaccccctcccccatccctggagttgtttctgcgcggagcttagccctggggagaggaggaagcccgggctgtgaccccggcctttcggagggtggtctgcgtttcctcactggcccctccccttgtcttccagataccctgtgtaacgaactcgaccaggagcggaaggcgcgctatgccatccagcagaaattgaaaggtgcggaagccgggaaacaaagataggaggggtgctgggtgccggccgtgctgtcgactgaatgaatgaatagtgggactagtgaggaaggccacgatccacgtggatcaggatctgtgagggagaaaagtgggaactgattttaacgggaagattattctaggatggtgggggtaaaaagaaagagccccttgggctttggacgtcagaaaaatctgccttctattaccaattctggctttgagcaggttgactcctctcttactgtgcctcagtttccttttctgtaaaatggggctactgaaccagagcagtggttctgaatcaccagcttttgtcctaccctcctgcctcctcctgatccgctcggttgagattccctgaccccaaagggttggtaaggccggggaggggaaagggtggactgcgcggtgaggtgagcctggagaggcgcccagagtgaccctcgcgactgtctccccagaagcccacgacgccctgcaccatttctcctgcaagatgctgacgccccgccactgcactggcaactgctccttcaagccaccgctgttgccctagggccggcctggccgcacccctgcgccctcaagccatgctgctccttgtaaatacccgctgctgcggtggccctgagcgaggaacaagccattcggacccgaccgatgtaaatacagccgcccgtccgcccgccttcctcccgggctccccggccttgcccgccccctcccgggcgtccctgtccagggccccggcttggtttccaagtgtaaataccgcctcgcgcctcaaatccccctaccccgtgtgaactctagggcatcggacctcaaggggttaactggacagacggggggcgggaggggagagcgccccctcccattgtatagccttgaacccgattgtgaatacaatgtagcaacttcgctggcgcctgccccgcactccccgtcccgtccacttctgaaactcctgttcctaatgacaaagtggctatgtgcaatggatataaatgtactgtgagtctctcggttcagtattaggttcactttaatttatttatgctgtaagttatttttgcttccttctcctggacccacttccagtcccgttttgcattcccctttggattttgctttggctattttttgttgtaacctcttgatgtaacagcactttaaaagggcgacaactgactcacgagatggcaaccacctggagcctgtttggggagaccaccctgtacccgtgactttcgtttttaataataataataataataataaaagatgtcacttctggggctacggaggtgggagtgcaccggcggagcggggcggcggaacaccgtgcaacaggtgggggtgggagccgccccgcgggttctggggctcccagggtcagaatcgggcctgctcaagtgggcagcagcgagcactcaacctctccactgtgccctccagacacactcagttttcccccacagggcactccctctccgcgtttaggaccctcccttgggcccggaatggaggaggggcattacgtcacggtccttagcgcagcggtcccgggctctttcctcaagagctcgaaggcgccgagggttcatccatgcccatttccacgcctgccacaccggggaagttacctccggggcgctcacagacagggcgccctgccgggaatcccaggttcaaccagaattgtccctttagatggcgcgggcaccgccggcctggcctggcctgggagcgctgcggcagggcggaggtctcagggagtaaggtggtctccgccgggcaggcttggaaaggaaggcgggacttggagagctcggtcacagacggcctcccgtctgccccgccgctacccgaaaggagggagccccgtccgcattttctgttcggtccattttagttcgagaggggctaaggactcgccgggcctcggctggggcgtccgacgtccgggtcacggttggcaaggcctcccagcggcctcagtttccacagcgcacctcctgcttgggctacagacgacgctgcaaattgcagaaca

SEQ ID NO: 550 - DNA, 17293 bp, Homo sapiens
  source 1..17293: mol_type = genomic DNA
aagagtcagatttttttctttaataagcgcagtagaagaggtgaactgaagaggaggggctgcagtcattgatgaagacaaggtccaaggcaaaaccacagactaacaaggtaaggtggaggttgagatttatggaagcagagttcagtgacggacaggccagggtatgccaagggagtgcttataactaactgaccctgaaaaagttttttttttttttttgagacagagtctcgttctgttgccctggctggagtgcagtggtgcgatctcagctcactgcaacctctgcctcccaggttcaagcgatcctcctgcctcagcctcctaagtagctgggactgcaggcgcatgcttgagttcaggagttccagagaggcctgggcaacatggcgaaacccggtctctacaaaatatttaaaaattagccaggcgtggtgtgtgcctgtgtagttccaggcactgcggaggctgaggcaggaggatgcttgagccggaaatgcagaggttgtagtgacacgagatcgcgccactgcactccagcctgtgtaatagttcctggatcaaaaaaaaaaaaaaaaaaaaaaggaaatgtatctgaaactttccaagctccaatttcctaatctgaaaaattgaaatagcggtacctacctcacagagtggctaatttaatgcagtgctatttgcaagggataatttatcaaacctttaggcgttgttctaaagtgcccattaaatgctcactgaactcacagccttaggagggaggttcgagtttatgcccattttacatatgaggacgcgttggcaggtggtactgctgttcatgggatctgtaaagagtgaagaaggagtctcagctctcagtagagttcataggctctaggatttctgctggaagtgagaacactgcagggaggcaagaaagcgggcatcagacggtgcaaagcgaccctgggcccagatcggcggccaatggctccctccggtggcggaagcgaagagcgcagctggatcgggcgcgaagggaggatccccgcagcgggtgaggggcgaggctgggacccggtggaggttctagggttttgagaggttggaggactagaactccagaagtccctgaacgaagtgggccggatttcccgtgacgcacctggcccaggtgttgcagccccgcccacctccctgccgctttccgccatcctcacacgccccctttagtggggtggctgctcaccgcacctcggagctcggactggggtccggcccctgcggcgacgattgtttgtacctaagtgaaggaggctccgagacccgcggcccacgtcctgccggagacgcttgtctgcagggctgcattgcatccccgggcgcacgtggagctggagcagcgcaggctggggaagagcagagagggtcgggcttctccgggcgcgccatggggcggggccgaggacggggaccaatagcgcgcgcgtgctggtgggggtggggacaggctccaggcctggcatcccggtagccgcagctgtcttttccggcccccgtgcactctccgcccgagcggagccccccggctcgcggggatcgcccccgagcgctgcgtcctgcgggtgggtgagtgagcgcctcgcggcccccgagctgtggggtgcacctggccggggagaaggatatcttggctcccttgcaccccaacgggcgcaaaggggcaggagcccggattgggggaggaggaggacccggggaccttgtgtcgctcggtgggagccggtctgtgtttctgtttcgctagggtgtgtttgggttggtagagtttgtggggaggggtgcctcgtgtggatgggaggaatcggggaggctaaggcgaggaggagggggtttgagatgggttgagggagaggattgacggagggtggggttttgaaagagttggaagtttcttgttacctgtgggtgcggtgattgcattggggggcttggtaggggcagctcaggacaccgaaggagaggatggggaaggctctcctgcccgtaacttacttcccttttgggagatttggttcctcttgcattgctagttaaggaaggagaggctggagaagcctgtgccgtcagagaacctttgcccctttccagaaccggtgccatccctagtctcaggaacataagggaaggggtggcccccaggagccgggaggggccttgaaacccctgctgacaggtttggggtaccacttttttgtggggcagtggctggtaccatttgcagcccacggacttttttgagttgccggtaagcagggtgtgggtgcgttcctgtttccttgcggttgtctctttttttttttttattgacacagggtctcgctctgtcacccaggctggagtgcagtggcatgatctcggctcgctgcagccctacgcctccaggactcaagcgattctcgtgtctcagcctcccaagtagctgtgattacaggcatgcaccttcacgcttggctaatttttttttttttcttgtgagacggagtctcactctgtcacccaggctggagtgcagtggtgtgatgtcggctcactgcaacctctgcctcctgggttcaagggattctcctgcctcagcctcccaagtagctgggactacaggcatgagccaccatgcccagctactttttgtatttttagtagagacggggtttcaccatgttgaccagggtggtctcgaactcctgacctcaggtgatccacctgcctcgtcctcccaaagtgctgggattacaggcatgaaccaccgagcctggccaatttttgtatttttagtagagagcagctctgtcttttggggaggcttcagggtgtttgattagtggtctttgggggtgggcgagctctgtgggggagcttttgatgcaacataatctcctttgcaggtcacctaacccatttgtggcttcctctacctgtgctcagccatggccagcgagagctcacctctgctggcctaccggctcctgggggaggagggggttgccctccctgccaatggggccgggggtcctggaggggcgtctgcccggaagctgtccaccttcctgggtgtggtggtgcccactgtcctgtccatgttcagcatagttgtttttctgaggattggtgagtgggtcctggggcgggtgtggactgactatagtatgggaggacatgatggggaggggtggagatgggactgggataagattaggaaggggacccaagagaagcggttggctgaagggtttggggaggggctctctgtgggcttgcatttagctccaccctggagctctgcagaaccagggggtgggggatatggggtgtgagtcccctgtgacctgatttgctgctcctgcctcagggttcgtggtgggtcatgctgggctactgcaggccctggccatgctgctggttgcctacttcatcctggcactcaccgtcctctctgtctgtgccatcgccaccaatggagccgtgcaggggggcggagcctactgtatcctccaacatcgatggactggggtctggcctgttctgcctgctagggagggtgtggaaggggccattacctttgttggctcaggggcaagacaagtgtttttttcattcttaaaatttttttaggctgggtgcggtggctcacatctgtaatcccagcactttgggaggctgaggtgggtggatcacttgaggccaggagttcaagaccagcctggccaacatagtgaaaccccgactccactaaaattacaaaaattagctgggcatgatggcacccgcctgtgattccagctactcgggaggctgaggcacgagaatcgcttgaacctgggaggtggaggttgcagcgtgccaagatcgcatcactgcactccaacctgggcaacagagcaagactctgactcccaggctgcagtgcagtggcgccatcatagctcactgtgatctcgacttcctgggctcaagtgatcctcctatctcagcctcctgagtagccagcactataggcatgtaccaccacccctgtttaatttttaaatatttgtagagatggaatcttgctatgtttcccaggctggtcttgaattcctggcctcaagtgatcctcctgcctcagcctcccaaaatgctaggattacaggcgtcagccactgtgcctggcctggcagggcaagttttaataaatgtgcagcaggcaggctggtatagtgaaggagatcaacattgccctgcacgttgatgccaatttctagtccaacaatctcatctgttaggcagtgattgttttacagatgcagaaactggcactcagaggatatgagtgacttgggcaaagccacatggctggggcctggctgcacttgggttcagtgcttggagctatggcaacttcctcacgtccatttcagtcttttcccttaatgctcacccctgcttccactttcagtcatgatcagccgcacactggggcccgaggtcgggggcagcattgggctcatgttctacctggctaacgtctgtggctgtgccgtctccctcctggggctggtggagtctgtgcttgatgtcttcggggccggtctgtgctctgtccgatctgggcagtgctgcgggtttacagggtctgggagtgtgggatcatgagggagaaggtcctctccagcagaggggcagactgagccattaccttggctttctggagcttctgctgtgtggccagcatcgtgcaggagatatggacatccctgagattgtccttgcctgcagggagctaaccatctaatcggagagaccaggctaagattcttaaaactgacagagaccaccagggagagctaagatgctaggatggagctaagagggaagtggggaaggtggactctctgatagcaggtgggcagaggagggcttgtcttgctttgggtcacagttggggctgggtcccttcttatttatttatttattttgagatggagtcttgctttgttgcccaggctggagtacagtggtgtgatctccgctcactgcaacctttgcctcccgggttcaagcaattctcctgccttagcctcttgagtagctgggattacaggcactcaccaccacgcctggctaatgtttgtatttttagtagagacggggtttcaccatgttggccaggctggtcttgaactcctgacctcaagtgatccacctgcctcagcttcccaaagtgttgggattacaggcgtgagccccggcgccctgccccttcttcttttttttttttttcttgagagaaggtctcactctgtcaccaaggctggagtgcagtggtaccatctcggctcaatgcaacttctgcctcccgggctcatgcgattctcccacctcagcctcccagtagctggactacaggcatgcctccccacacctggctaattttgcagtttttgtggagctggggtttcacaatgttgcccaggttagttttaaactcctggactcaagcaatcctcccacctcggcctcccaaagtgctggaattatagatgtgagccgcccaccatgcccggctggtggggtgccttaggatcgggccttctaactctgtccctacctctctccagatgccacagggcccagtgggctccgggtcctgccccagggctacggctggaacctgctgtatggctccctgctgctgggccttgtgggtggggtctgcaccctgggagccggcctctatgcccgggcctcattcctcacattcctgctggtctctggctccctggcctctgtgctcatcagttttgtggctgtggggccgagggacatccgcttgactcctaggcctggccccaatggctcctccctgccgccccggtttggccacttcaccggcttcaacagcagtaccctgaaggacaacttgggcggtgagctgggtgctgccgtggcagggatctcggggtgaggggtgggcagacgtcgggccgggcccgtaaaacctctggatgagcacaggtgtcagagggaatggagggcaggaggtctggactgcagagcagtgcaatttaattcaagcctgtctagcgtgtgcttggccggcagggcaggaggaagcccacaaaacagtccctgctttagaggaacttgtgttctagctgaggagagacatgcattcaggaatcagttaaatagcacagaatggcccagcatgacttaaacagatcaggatcacccaggagtggagagaagggaggcctgactatgggctggggagggcaggagccggggagctggaggtggcctgagatagacaggtgggggattcagccaggagctgggagcagagagggaaggcatctcaggaaagagcttgagaccaggtgcggtggctcacgcctgtaatcccagcattctgggaggccgaggcaggaggatcacctgaggtcaggagtttgagaccagtctggccaacatggtgaaaccctctccccgtctctactaaaaacacgaaaattagctgggcacgctggcttgcacctgtagtgccagacactcgggaagctgagggagaactgattgaacccgggaggaggagccgagattgtgccattcagtgagccgagattgcaccattgcactccagcctgggagacagtgaggttccctctccaaaaaacaaacaaacaaaaaaaacaccataaaataaaaatacaaaaattagccaggggtggtggtgcgcacctgtagtcccagctactcaggaggctgaggcatgagaatctcttgaacccgggaggcagaggctgcagtgagctaagatcgccaccactgccctccagcctgggcttcagaacgagactccgtctcaaaaaaataaataggctgggtgcggtggctcccgcctgtaatcccaggactttcggaggtcgaggcgggtggatcacctgagtccaggagttcgagatcagcctggccaacatggtgaaaccccatctctactaaaaatacaaaaattagccaggcgtggtggcgggcacctgtaatcccagctacctgagaggctgagacaggggaattgcttgaacctgggaggcagaagttgcagtgagccgagatcgcaccactgcactctcgcctgggtgacacagcgagactccatctcaaaataaataaataaataaaattaaaaagttagatgggcatggtggtgcacacctgtagtcccagctacttggcagactgaggcaggaggatcgctctagcccaggaggtagaggttgcagtgagctacgatggtgccactgcactccagcctggatgacagagccagaccctgtctctaaaaaataaataaataaataaaagagcgtggattagggtctggagggaggaatatcggagcactggggggacgtggcaatgtgtctggctgacccagggccagtgcaggaacaggctggggtcttagtgagggcagtgcaggggaggcaagaggaccgtgggaatgtgtggagagggtggctaagaggcctggatccctgagacggatgctgatgcactctcctccctgggaggatcctcctagctggctatgctgaggactacaccacgggagccgtgatgaattttgccagcgtctttgctgtcctctttaacggctgtacaggcatcatggctggggccaacatgtcaggtgagagtccctgcctgctgcctcctgggggtttggggctgccaccgtgagggacccagggggatggctggagggctgacctcactccctctgctccccctctccaggggagctgaaggaccccagccgggcgatccctctgggcacgatcgtcgccgtcgcctacaccttcttcgtctatgtcctgcttttctttctctccagcttcacttgtgacaggtgtctggggagggatgggggtggagtgtcgaacaagattggtgcacctgggtcaccaaggggaaacacaggctgggggactgggaagcagaaacccagcttgttggggtggagggtggctaccggcgattgacaacctatagccagcagctgccatggacccagtactgttgcaggcacttagcttgggagtgagggtgggtagtggctttctacccagtttgcatttccacaaatatttggcctcttgtgcatataccattaggtatgacagccgggtgcggtggctcacacctgtaatcccagcactttgggaggctgaggcaggaggatcgctggagcccaggagttccagaccagcctgggcaacagagcaagagcctccccccaaatacaaaaattagccaggtgtgatggcaaatgcttgtagtcttggctacttgggaggctgaggtgggaggattgcttgagtccaagaggtcgaggctgcagtgagctatgattacagcactgcactttagcctgggggttggagtgagaccttgtctcttaaaaaaaaggaaggaatgaccactgagtgattaaatccaaggctgcccaatgaataccaggcatatccctttagcacatttgatatctgagtctgatccttaagatcggggctggagattttcttaccccgtgacgcatgatcatccgtgtcctccttttcctccttcctaggaccctgctgcaggaagactatgggttcttccgcgccatcagcctgtggcccccactggtgttgatcggaatctatgccacagcgctctcagcgtccatgagctcgctcattggtgcctcccgcatcctccatgccctggcccgggatgacctctttggtgggttctctgcctccttgctggcttggagcacgccctcccttgtctgtctctccgtccccgctgagccctggctgatgtgtctgctgtggattctgtttttctaggcgtgatcttggcaccggccaaggttgtgtcccgagggggaaacccctgggcagctgtactttattcttggggcctggtgcaggtgagccttcttcttcaaggggccctttccctcaccccaccagctggcaggatgggggtgcagttagatgcaggctgggagacaaatgtaaagacaaatgcgtatgcacttggggttgcactggcactctgcagggttcactggcactttgtggggttcaccagcaccttgcaggttgccccagtgctttgcagagttcattggcaccctgggaggttcactggcactttttggggtacacgggcattgtgcagggttcactgacactttttggggtatactagtatttttcagtattcactggcactttgtggggtgccccagcactttgagggattcactggcactctgtgggatgtaccaacactttgtgggggttcactgatactttggaggtttggtggcactctgtgggagtgcattggccctttctggggatcactgacattgggggtgcacttgcactttacagggctcacgggcacttttcagggttcattgacactttggggtgcactggcactctctggggttcattgacactttgggggtgcgctggcactttgcatggttcactggtactttccagggttcactgacactttgggggtacactggcactttctggggttcactgacactggggatacactggcacttttggggtttaatagcattttaggggctcattgacactttgggggtgcactggcacttttggggtttaatagcattttgggggttcattgacactttgggggtgcactggcactttgcagggttcactggcactttctggggctcattgacactttggggtacactggcattctttggtgttcactggcattttgggggtgcactggcactttggaacaacggcacgcctcttggcccttgcccagctggtgctcctggctgggaagctgaacacactggctgctgtggtcactgtcttctacctggtggcctatgctgccgtggacctgtcctgcctgagcctggagtgggcctcggcccccaacttccggtgagagactcagatctgtgtccccagagagaagaagggaggactcgggctcaggcgtggggctggggactgcagcctcgtgtgcggcctgccctgagtttctgtccctcctcccctccatgcccgcagccccaccttcagcctgttctcctggcacacctgcctgctgggggtggcctcctgcctgctcatgatgttcctcatcagtcctggcgcggctggtggctccctgctcctcatgggtctgctggctgccctgctcaccgcgcgaggaggccccagtagctggggctatgtcagccaggccttgcttttccaccaggtatggggagctggtggggcggtggggaaatgggaggtggtcaaagaaccccctctctctttggctggagttggtgctcccgtccaggaggcgctgaacggggctgtgcatttgatcctgccacttccccactgcctcacccctatacccaggtgcgtaagtatctgcttcggctggacgtccggaaggatcacgtgaagttctggcggccccagctgctgctcctggtggggaacccccggggcgccctgcctctgctgcggttggccaaccagcttaagaagggggggctgtatgtgctgggccacgtcaccctgggagacctcggtgagctgccctcccactcactcactcactcccatccttctctccccctaccttttttttttttttgagatggagcttcgttctgttgcccaggctggagtgcagtgggacgatcttggctcactgcaacctccacctcccaggttcaagtaattctcctgccttagcctcctgagctgggattacaggcacacaccatcatgcctggctagtttttgtatttttagtagagaaggggtttcaccatgttggccaagctagtctcgaactcctgacctcaagtgctccgcccatctcggcctcccaaagtgctggaattgtaggtgtgagccaccacggccagaacccctcccccgcttttttttgagacaaggtcttgctctgtcacccaggctggagagcagtggtgccatcatagttcactgcagcctcaacctcttgggctcaagtaatcctcctgccttggcctcctgagtagctgggactacaggtgtgtgccaccaggcctggctcatttgtagagatgaggtctctttatgtttcccaggctgtctggaactcctggctcaagcagccctcccaccttggcttcccaaagggcagggattacaggcatgagccccgacaccagcccctctgccccttttatcctttcccatgacccctccaagtagccatagccctgcccaggcccgtctgtgatttggactctaggagacattgagtttggacaacactggctaccttcctttccttatcttctctgtagactccctgccctcggaccctgtacagccgcagtatggggcatggctcagcctggtggaccgtgcccaggtgaaggcttttgtggatctaaccctctcaccctccgtgcgccagggggctcagcatctgctgcgaatctccggcctcggtgagctgcttctccctggatgccctcggccttcctctgtggccacttcaaatctccgctcccctcccctagagagtcagccacagattgcaaactgcaaaaggaccttatagtcgagaggagataagacagtgctcaaagataatagcctcagacagtgtgtgataaggtctaataggagatgctagggactagtgatggggtgggcgatgttgtgggttttttttccttcttcttttttttttttttttttgagacggagtctcactctgtcttgcccaggctggagtacagtggcacgatcttggctcactgcctcctccacctcccaggttcaagtgattctcctgtcttagcctcccaaatatctgggactataggcatgtgctaccatacctggctaatttttgtatttttagtagagatgggggtttcaccatgttgcccaggccagtgtcgagctcctgacctcaggtgatctacccgcctcggcctcccaaagtgctgggattacaggcatgtaccactgtgcccagcctttccttctttttttttctgatccaaaaattggggcataggcactgaagagtgtatttttggagacaatggagcattatttgaatctccagctgcctcatcaaatcagatggtttttaaccaccagtgttcagaggaaggcaggccagccactatacactgatgtggccagcaaaggttttgcggagagatggtaattcatccagactttgaaagaggttgggatgtaggagatgtaacatgtctcccctgcccccgccacccaaagccacaaaggatgccggaggctgtgtggggcggacgtctgtggatggagcggtaaattctcagcttttagcgctgaggccaccagggttatctatgctcagtcactgccttttcccttaatcctggaccagtgcccgtcaccaaagtgcatgcttccttctctattcagagtctggctaaagttcaacagtgttggacattgcccagttcagtgtaaatcagaaccctgggaaatactgaggagggggcatgactagtttattttgcaagatcagctggaattcacacctgcggagatgttttggggtgtcgtcaagcatcattgacccacagaacatctgagagcctggtcttcactttttgtgcagagaccacaatgcttatgaaatacgaaatttttcctgtggaagatatcaggtcggtgcaaaagcaattgcggtttttgcctttttttttttttttttttggacagggtctcactctgttgcccaggctggagtgcagtggcacaatgtcagctcactgcaacctctgcctcccgggttcaagtattctcccatctcagcctcccaagtagctgggactacagatatacgccagcattgtccggctaatttttgtatatttttggtagagacggggtttcaccatattgcccaggctgatctcgaacttccaacctcaggtgatccgcctgcctcagcctcccaaagtgctgggatgccattttaatgggggaaaaaaagaaccacaattacttttgcaccaacctattccaataaaaggaaaagtagttcctttaaatggtggattctcctgtcatagaaaatttgatttatggcttgagcagtgtttgtttcatgagaaggggtcttggaagaggtctctgcgtctccctgtaaactcagcaattatccgattccacaagggttgttcaaaaattaagaacgaagagcttgtcagcagggacttggagcattgtggttgccacgtgcccagctcggtggctcagagtgtggcctctcacgctggatggaggcggattgcgttgacctacctgccccagtacctaccagatatgagcctatgggcaagtgacttcatcccttggtgctttgggctccttatcagtaaaaagaggagactaaatattacctacctcatagcattacttcgagtttcaaataagttaaaatataaagtgctttctacaggacatagcccctggtaagcggataccatgcaatgaaccaccatgattagggttttggtaaaacctactagggttagggtttactgcagtaaacatacggggtagccctgtttctttttttctttttttttgagatggagtctcgctctgttgcccaggctggagtgcagtggcgtgatctcggcttactacaaccaccaccttccgggttcaggcaattctcatgtctcagcctcctgagtagctgggattatagatgcccaccacaatgcccggctaatttttgtatttttagtagagatagcatttcaccgtattggccaggctggtctcaaactcctgatctcaggtgatcaacgtgcctcagcttcccaagatgctgcgattacaggtgtgagccacggtgccctgcctggtccattttttcatcttcccattgcagagtctgggacgctattaccctggggattcaggtcatgagcttggctgatcagggtgtctggtttgcacaacagagtcaaactcgcatcccctgccgtgaaacagatgccccgctagaagccgggagtggacagcatcctcctctccatagaattggagtgctcattagtggcaagaatcctaaggcgaactttgcctgtttaagtggaggagattagtcactgagataataaaataaatgcatgtgaaagtgtttaggaaaaatgaaaagtctttatgcaaatatgcagaatgttgccgtaagagcccgtacacagtgggaatgtcatacctatggctgacgcaccttgctgtcagtgtgtgggagcgtggtgtaaacttagcctgtgagcctgactcctgtctgttcctgccttccccgctctgcccccaggtggcatgaagcccaacacgttggtcctaggtttctacgatgacgctccaccgcaggaccatttcctgacggacccggctttctctgagcctgcagacagcaccagggagggcagttccccagctctgagcaccctgttccctcctccccgggctcctgggagcccccgggccctcaatccccaggactatgtggccacggtggccgacgccctcaagatgaacaagaatgtggtgctggcccgggccagcggggccttgccccctgagcggctgagccgggggtctgggggcacctctcagctgcaccatgtggacgtgtggcccctcaacctgctgcggccccggggtgggcccggctatgtggatgtctgcggcctcttcctgctgcagatggcaaccatcttgggcatggtgcccgcttggcatagcgcccggctccggatcttcctgtgcctggggcctcgggaggcgcctggggcggccgaggggcggctgcgggcactgctgagccaactgaggatccgggctgaggtgcaggaggtggtgtggggcgagggggccggggctggggaacccgaggcggaggaggaaggggactttgtgaacagtgggcggggagacgcagaggcagaggccctggcacgcagcgccaacgccctggttcgggcccagcaggggcgcggcacaggaggagggccgggtgggccggagggtggggatgctgagggccccatcacagccctcaccttcctgtacttgcctcggccgccagccgatcccgcccgatacccccgctacctggcgctactggagactctaacccgagacctgggccccacgctgctggttcatggggtcactccagtcacctgcactgatctgtgatgcccctgcctccagggctaggtagagagggcccaggcaggcggcctatcctgatccttggaggaggaggaagaggaggccactgtggcccgtggccctgcccttgggacgtggagcccaggggaggtttgaaggggatcctgggcttgggcatcacgcccacctcctttggcagagggaccccagcacactaactctgggtggctgtccccaccgtgcaggggagggagtccgcagcctcccttcactggtgccttgatgctaggggccaggcctcctctgtgactctgggctacctcagtttccccattttggccagactcaccggcccactggggtggtgatgttttcgttctgttttatttttctaactctgctgaccatgaataaaagaccaaaacactacaggctggctgagcagtgctggtgggtagctgagagggagggggtgggaatggagagctctgcagaggggtggagatcggagccttcagcctcccgccgcgaggctgccacgtgcagggctggggtgcggggcccggacgcatccgtggacttggaggctggctcgggcccgcacctcccatccccagctgcccgcaacccccagtgactcgggatcccccggagagccctcccctctcggcaggagggggctgactcagggagaaatggcagtttagggcctagggggccacgtgaccctcccccaggaatgtggtgacgtcatcggaggcgtggtcgtccccaaaattagggaggaagaggaaaaaaaaaagccagaaaaagttttcttttctggagtcccaaacgaggtgcgggacggaagagggggtgaaggccagaggctcggggcttcaagaccgctgtctggagtccccctttccaggccatgtcggggcccacctggctgcccccgaagcagccggagcccgccagagcccctcaggggagggcgatcccccgcggcaccccggggccaccaccggcccacggagcaggtaaggcagcccttgtgagacagaagagccacccagctgtggcgctcacctctgtcctaccgctccagcctcccgccctggctgcttcctcctgccccttccccaagccgaggcggggggaacagccgcctgcgctctcttgggaccctagatttgggggaggaggtaacgagaggcggagagggtggctcctcaaatatacacccctcctgtcctccgccaccccacctttgatttctcttccctcaacccagcactccagccccaccccagggtcaatttttgcccccttccatctgagcagtgttaccaggccccagggggaccggaggatcgggggccggcgtgggtggggtcccatggagtactccagcacacgcaggtgagacccgggatcgtggggtgggacatgtgggatcccccagaaccgagtctgagggacccaggacaggagaaggcctatggtgatttgcattcttcctgccctggctccatcctcaggggctccctgcagacagggggggccttcgccctggaagcctggacgccgagatagacttgctgagcagcacgctggccgagctgaatgggggtcggggtcatgcgtcacggcgaccagaccgacaggtgactctgcccctcctccccgtcagcaccctgcccccttctctggactctcagacccagcctgatcgatcccccatgtgtgtaatgtgcaccccagcatggaggaagcgtggctgcaagtaccaacatgtcagccacttgaggacgggaccttgtcaaatgcaaaaagcctgtgcttccccacagccagggtcatttccacaaatgtgggtcttggagtggggtccttgcttacgacttctggcctgcgtttctcctcaggcatatgagcccccgcca

SEQ ID NO: 551 - DNA, 58438 bp, Homo sapiens
  source 1..58438: mol_type = genomic DNA
cctcaggcgagggggcctgaggtgtgtgcagatggcccactcgggaatagtaggtgaggcctgaaccagcacacgcggcctgtgagcttgctgtgcattcccagaggtggagcatccaagcaaaggacctcatgggctttgggcctgttaagggctcacctggagggtcatgggtcacctttgcactgacagggtgttactagtgggttctagaggagagcaggggactggaggcaggcctgggagctggagcagagccgacttgggggcccaggtctccgcagacctttccaggaaagagctaacagatgcacccagtgtgcttcccaccccagtgggagagctgccaccgggaggtggtacccagctctgagctaagaagagcctctgatgggcagagctgccccactgtgggttgagatgctcgggaagtggtgacctccctgctgctggaggtgtgtaaggatgctcctgccaagtccactaaagagcagactcctgccttgtgctgggacagactcgattgctcaaggggtcttagagatgtgacacctagaaggggctgctaagcttgtctgcatgaaggtgggatgaccgattgcatgacatctgacctctcccaggtgaggaggcctcagggaaggaaggatgctctcgtggaggcctgcagcccccagccctgcagtgggaggaggtgtcctggggtcgtgctcttcccagactcctcacactccacccctgggaggagggtggaaggagttcaggaatggggcagtgggagcaggtgccctcttgacgctgagtgacctgggggaggcctgtcccctccctgggccttagtgtcttcaagggcatcatggtgcaagcccctccagaccccagagctgtatcttctccccaaggcatatctggaacaggctgtgttgccagggcccttctgtgtgccctgcaggcctcctggaggcagcctggggtgtgagaatgagggagaccatctggaaatgtccctgggcacgcccctgtctaaagcaaagcattcaccacggggagccagactgggaaggaaatctgtttcttctttggggactgatctcaaggccctgcctgcagagcagagcctagaccatggcagagaggtctgtccacactggacgatgcccagctgccctgtggttattgagacaggctcctgggtaggctagcttatactctgtcttctgcatgtgacagctcagataggactgtccttactgcagccaccaggacaggcttctctgcactctggctgcccatacaggcctgtccacacactggcagcctagacagacctgtctacactccagccaaatggacaagcctgttagattctggccacctgcataggcccgcccatatcctggctgcccagacaggcccgtctgcactctggccgcctgtattaattagcccagtagctaatatcatatttgctggctagcataaggtgttgaagcccacaagaagtgaaaaacaaaatacctttatttagttaacactgaatttgcaaacacagaaaggaatagaaaacctgactccacttggacgcacaggcctttggggagttctgacaccagggccccatcggcagctccaccagagcatcctggctgcacctccttcccggagtcctggcttgcctacctattccatgggaggttggcctggatgtgtcaagggggcctttcagctctagtaaagacatctgtctccacatccaaggagctttgcaaaagacacgtggcaggacaggagactggacgcactgtggcctggggaaggcagcggggcttggccctgggctgctccccttggggagaactgtgtggctgaggccacctgttatggggtggggcctgggcctggacacagctgcaggctgccctgtcctccaagaggagaggcggggcttgaaagatttgagttagtgtcttgaccttaacgtgagaccttggacaagtgttttcagctctcagagcctcaagtctgtcatccagaaagtggggccggataacccctgcctgccgccctcaccgggctcacaccggggaaactgtcacagcggggcctcaggcaatgccgggcccatcactccctagatggggctcccccatgcagcctttcccttctctgagatacattttccgtcaagcggggttaattccagcctctcaagggtgagaagaatgtgtgatcctggcccctgccggctgctcaggagggttggagagtcgagttcctgcctcaggaccctgcccctggaggcctcgcctgcccctgcagctccgcaggctcagacattggtctccagctcactgatctggatggtgcagtggttcagactcgcagcgggcagctcctcatcctgctccacttgaacggggacgtggtgggggcaggtggggcccagggtgagctcggaggcctcggctacactcttcacacagccattctgctgggctgccacgatctcctggaggctcactggcttggtctcgcagggcagcagtttctggtgaagggaaacaggtctttgtagcagcaggagggaccaaggttagatacgagggaggactgagggccagtggggcagaatgagctcagggctaggaaccacaagatggattttcctgcagacacgctgtgtgacctcggcaggtcacggcctccctgggctcctgttcccaagcgtcctgcctcccactggagctggcttagtagaggaggggacttaatccacagggtccatctggggaattggtggatcccctgcctgacctcagcttcttccccatgatgtggggacagccttctccatttgcctgtagaaggagcctgaagcccacacagcctgcacagacctacaaatgctcacatgttggctaaactggacagaccatcccgacacgagggcggggaattttatcatatcttgttctactgttcctcctgtgtctatatcagcgccagccacagcgggtgctcaataaatagatgttagaggaatcagtcattctgtaacggatgaggagaccgaggcccagaggcatggagggagggattggctggaggctgccgagctggttggtggaagatctggtgccctgcccaccctgcgtggctccaccctcctggcagcctctggatctcactgctctcacctcggtgcctgtgtcccgggcaaaatccttccgacatatatgggccatgatccccgctgccagcgcatcacccagcacgttaatcatggtgcggaaacggtccctggtgagccaaggttgggggtgagtggtgggcacttgaaggggagctggaagagggcagtgctcaacccagcacagtacagcacggccggtgaccagctgtcatgcaaagcctgcagccagatggcttcctggctcctcccaagcccaccctttggcatcattgaagcagcttcttggcatgcagctgtgggttccacaggtccccatgcttagaagggttaggtttggtttaatcctctgctgtttctgtcttgaaattctttataggtttgttttttgtttgtttgtttgtttgttttttgagacagagtcttgctctgtcactcaggctggagtgcagtggcgccatctcggcttactgaaacctccatctcccaggttcaggtaattctcgtgcctcagccacctgaatagctgggattacaggcacatgtcaccagtcccagctaattttttcttttctaatttttagtagagatggggattttactgtgttgcccaggctgggctctggaattcctgggctcaaggaatgctcctgccatggcctctcaaagttctgggacatataggcgtgagtcatcatgcctggcctttacagtttttggactgggttccacattttcatttttgaacactggaccccacaaattatgcagccaggcctgtgctaatgagtagggcactcccacagtgccaagcggggcagtccccagccttctaccctggggaagggactcagccgctcaccctgatccctgctgaccctgaagtcagcccctcccagagggctagagctagaggcaaagtccactcacagagcccagtcaacggcaatgatgagggtgatgtcatcggtgggcagtcccacggaggtgagcacgatgaccatggtgacgaggccggcctgggggatgccagctgccccaatgctggctgcagtggctgtgatactgcagggggtgggaaggggaagaggagcagcaggaggggcagggtgcattgtcagggtctggctccaaggaagaggttgagtgtcagggcctctgggacagccatttggtgcggggggtgggtaggaatgccacaccagggagctctcggggtcaagtccctcctcacagtcctgaagccccatggacccccattcctggcctcaggagaatccctgggaactgtgcaaacacctgtgtctggagctgtgcctctgtgggttccaggaagctatattgctatggggctgcccagggactctgactgaccaccacatggctctgcctgcctgcctctggggcctggcctccagggtcagacctgtgtgcttggctgggctgtgaggcctccgtcagcctcagccgcatcccagcaccccttcgttggctcctgccacacgggcggcctctccaaggtcctgagtcctgtccctggcctccgctcgccctgtggccaccagcaatgccctccctcccgggctgtcctccaggctcggagctcccagccctggccctctgcctgctgtgctccgagcccaggctcgctcgcttcagatacccctcaagtctgggagcctgggaatccccaaggcccccagcccccgccccatccacccaggtgcagtgtcagggtgcacctgatggtgatgatctggccaaagtccagctcgtagttgttgacctgggcgatgaagatggcggccacagcctcgtagagcgcagtgccgtccatgttgatggtggcacccacgggcagcacgaagcgagcgatgcgccggtcgatgtggttgttctccagcaggcacttgaaggtgatgggcagtgtggctgagctacggttagaggggccggtgtctgcccagcaccctcctccaggatggctggggcctctgtcgggaagctcacccctccccaggcagccaccccgccaggagtgtttgtgcctctgcagcgctgctccggcaggaggtaaggaccgcgggcactgcagtgctctcacttggttcttcctatgagggaggtgtttgggtgcattttacagatgaggaagctgacgcccagagggcggggctgacccatgtcacactgctgtgccgagggatatggaggtctgagcagcagggccctgggccaggctgtctgggcttagattccagcctcctgtcaagtggtcctggcaagttcctgaaccctgtgcctcagcatctttgtcccaaaaagacctgggtcacagagctactaggaggattaaacgactacgggcttggacagcacctggcccattgtacccactcagtcaatggtgaccatgactattattattactatgtttgtcatgagagttcccagtggcagtgctgggactaaaacaggccggtgtggcccctgtgtcttcctctcccccgggcctctgcctggaaggccggttctactcgccagagcctctcaggagctccagacctgctgggcttgaggctgcggttcctgctggcaggagatggccagggggctgctggctctggctggcttggcccctggcatgggagctggcatgtttggggctttgtcctgccctctgaccccctatctgcgggagggtgttcctggcaatggctcctgggcttttcttcactggggtctgctcctgaatcctgcaggaggtgcatctgctgccaggggtgggtgtcatatgactgctgggtacagaggcctgcagggcattttacagatggaaaaactgagacccaagtgagggctagagggaagagtgaggccttcagtgccagaaagatgtggcttaagttcctgcgactcccttaatgtggagctcagacacttgccatggggagagccaaactgccttcacagcactagatgctccataagggaccacttccttcctgccccctccaccaacgacatggtttgcacaactctaaattcctgaggtctctgcactgggctgaggtttgggatccttaaggccaagtgctggttcacctggcccagcctggcaaggaggggctcgacctccactgcaaccctgtgagctggaagctggagtctcccccagtctgtgcatgaggaaagcaatgcccaggcacagcgagtgagtgacagagccatggctcaagtccctgaggtctagggacactgccaaggttgtgacagggcacccagccaggacatcccagcggcagtggacaggccgagctcctagagcaacacagggcccgactccaggagaagcaccttgtggggcaaaaggcagcagcagtgcgttgccaatgtgatttcccactgactctactgtgctgtctgccctggcgcgtcgaggccgcccccatgcggactcagtgagcttgaggactggggccgtgggggaaggagaggcctcgacaaaggccaaaagtcccccacgtcagtcttgttaccccagcaccagccgtccccgcatttgtgaggtgggccacactggcgttttggtggttctgtggctatgaaccaatgatggctggacagacggacagggctcagcccctcccagctccccaccgtcctgcccgtccccggggctacctggaggaggtggccagcgcgatgagcagagcctgcaggatgccacggatgaagacgatgggattcttcttggtgatgaagaagtagagcaggggcaggataaagagcccgtggagcaccagcccgcacaccacggtgactgagtagaagcccagcttcttgccgacggccctggggtcgtccatctccaggatcttacccgcaatgaggaacacaatgccgaaggggaaatacctgggggcggcggggcagccaggctcaggaaccaggcaggcagacacaccccggccccagccccgcatcgctgcgcggccttccccctgagcttcctggggctcctgcgaggacagagcgagactgccaaggtgcccggcccaggctcagcacatggcgtccttcataccgttacttccaccgccccagctccagacaacctctgccactccttcccccgccctgccttcaggaggcccccatttcaggcccaacaacgccagagtctacacagtgcgcctgggcagccctccctctgcgttccccactgagctcctggactctgaactgtgggccgaggactctgaactgtgggctagtccttaccgccagctttcctttctccaaaagctgagctgataaggctccatgtgatggagaaactgagcccaggagagcagcagagccgggcagagctcttagaccaggctggaaggggcaggcccagggccggagccaggcctggctggggctgggggacccatggaaacacatgtagctccggaggccccggcccagggctgagcctgggcacagctttctgctcactttacgggagaagagggtggggtcttgtcttccctccatccacccagggctggccggggtgaggtgggtaaatgaggaggcttaccacacagccaccgccacgatcttcatgaccgactcattgaggcactggcagaagctgaccaggggggccccgctgtcacccatgcggcccagcatgatgcctgcgggtcagggacacagtgctgtggtaaagcagggacagacccacaggcccacatgggtctcagcatggctggcttcccagcagccttgatgctccagcactccccccactccccccactctctctctccctctctcctcctccactctactaccgatcccacagtgctctcacgtcctcctctctcaccttcctccacgcagcagccaatgtcacctcctcaggataaaagtgctccctgccaagtgcacccctggcttcgctgtgcgcttaggccatgacaagctccccgctgcctcacccagctcgatgcctcagccccactcgagtgggccctgcctgcctctccctcctgctcctgcccatctcactgtgccctggcaccactggccttctttaagtttctggaaggagggagtccagctcttcactgcctcagggcctttgcgcaagccgtttacacagtgccccaggcactggctgcccgctctccaaacagcttggaagccatccccgatcccctttgcaaactcccatttattcttcaatatctcacctcttagggcctattacaacataactgtctgggttttttcccgtctcctctgcgaggttagctcagcgagagcaagaactgcatctccttagctggagcatgttagacgcacagtggtcaatggtgagtgaggactagggcctttcctgatgctcctggcgcctcccccggcattctaggccttcctccccagctcgcacacaccaggaaagggtggtgtgggaacggctccgtggggtgagctctgtcaggccagtcctgaaacagggactgagtggctgccctacctcctggtgagaccgacgtggggagcagagcactctctacagctgccctcatgaggcccactgtcatggtgctggggctcagctagggaggcagggtgggattcaaaccctggcctgtgggacaccagagaagggctctttccctgtcctgagaagcctgagccacacagtccatggagcagctaccccgtggtgacggagtgaggtgagggccctgccagggtgggtaggagaggctggagttggaggtgaccctgggcctaccccgcccgcctgtcttcctgccgcctggctgatgcagacccagactcccctgccggctccgccctccccgggctccaccaccaccacgcacgggcttcctgcccctcctcaggcccatttggattttcccaggggcatccgaggactggctgctgggagccagtgtgcatggaaccctagtgtggcacgggggctccctcacggcagggccagcaggaccttagcaccagccacatcccagggatggggtggggaaaggaggctgggttgagggaaccaaagaaagccctgctcggagccgctgtgctagtgtgctcactcacacacgcgggcagacactggtatctgcaccaacaggcacaggcaccggcagatgtggacactgacaggcacaggcacacacagaagcaggtgcacacagacacaggcacggaaagaccaggcacacgctgatgcggggacacaggaatgcagctgcacccagacatgagcacaggcagatgtgggcacacgcaggcatgagcacacacagacgcaggtgcacatagacacaggcacaggtaagccaggcgcatgctgatgggggaacacagggacacaggtgcacacagacacaggcacggagaggccaggcacacactgatgcagggacacagagatgcacgtgcacacagacacaggcactggcagatgtgggcacataaaggcatgagcatacacagtaagccacaccctgccttggtacactcacacaccctgccttggtacactcacacaccccgccttggtacactcacacaccttgcctcagtacattcacaccgcctcggtacactcacacactctgcctcgttacactcacaccgcctcggtacactcaactcgccttggtacactcaccctgcctcgatacactcacacaccccgcctcgttacacacacactgccttggtacacttaaacccgcctcagtacactcacacaacctgcctaggtacactcacacaccccagctcaatacactcacacaccctgcctcggtacacacacacaacttgcctcggtacactcaactgcctcggtacactcactccaccttgttacactcacacaccccacctcggtacattcaccccgacttggtacactcacacacactgcctcggtacactcacacacaccacctcagtacactcacaccaccttggtacattcacatcgcctcggtacactcacacaacccgcctcggtacactcacacaaactgccttggtacagtcacaccacctcggtgcattcacacacaccaccttggtacacacacaccccgcctcagtacactcactccacctcagtacactcacacaactcgcctcggtacactcaactgcctcagtacactcacactgccttggtatgctcacacccccccacctcattacactcacacaccccacctcagtacattcaccccgccttggtacactcacacacaccacctcggtacacccacatgccccacgttgttactttcacgcgcctagcctcgatacactcacacaccctgccttggtacactcaaaccatgcatctgtacactcacacacaccgactcggtacactcacactgtctcggtaaactcaccccatcttggtacactcacacaccctgtctcagtacactcacaccaccttggtacactcacacatcccgcctaggtacactcacacgcctcgcctcggtacactcacacaccctgcctcggtacactcacacaccttgcttcattacaattacacaccccaccttagcacactcacacactccacctcggtacactcacacgcacataaaccccagctcagtacactcacaccccatgcctcagtacactcacacactccacttcgatacactcacacaccctgccttggtaaacttacacaccacttcagtacacataccacttcggtacactcacacatccacacacactgcctcagtacacacacacaccgcctcaatacactcacacacagtgccttggtacactcacataccccgccttgatacattcacacacccagccttggtacactcacagatactgcctcagaacattgacacaccctgcctcaatacactcacagataccacctcagaacactcacacaccctgcctcagtacgctcactttgcctcgatacactcacacgacctgcctcggtacactcacacacaccccctcagtacactcacatacaccacctcggtacactcacataacctgcctcggtacactcacacaccccgcctcagtacactcacacaacccaccttggtaccctcacacacactgtcttggtgcactcaacctgcctcggtacaatcacacgcactgcctcagtacgctcacacacactgcctcggcacactcacagaacccgcctcagtacacctacacgccccgccttggtagactcacatgccccacctcagtacactcacagataccacctcagaacattcacacaccctgcctcagtacactcacgcaccctgcctcggtacactcattttttctcggtacactcacacaccccgccttggtacactcacacaacccacctcggtaccctcacacactgccttggtgcactcacacaacctgcctccgtgtactcacacacaccccctcggtacactcacacacactgcctcggaacactcacacaacccaccttggtacaatcacacacaccacctcggtacactcacacacagtgccttggcacactcagaacctgcctcagtacactcacacaccccacctcggtacactcacacaccctgccttggtacaatcacaaaacccgccttggtacaatcacacacaccaccttggcacactcacacatactgcctcggtacactcaaacacctcgcctcggtacactcacaaaccctgcctccaagcactcacacatcccacctcagtacactcgctctgcctcagtacactcatacaacccaccacagtacacccacaccacctgccttggtacagtcacacacagtgccttggtacactcacacacagcacctcagtacactcacacacaccgcctcagtacactcacacactccgcctcagtacattcacacaacccaccttggtactatcacaaatactgcatcggtacactcacacacccttgcttcaatacactcacacacccccaccttggtatactcaccccacctcggtacactcacacaccatgcctcggtacactcacacaccacaactcggtacactcacaccacctcggtacactcacaaaccctgcctcggtacactcacataccctgcctccgtacactcacacattttgccttggtacactcacacaccctaccttggtacactcactttgcctcggtacactcacacctcagtacacacaccacgtcttggtaaactcacacaccccgcctctgtacactcacatgcactgcctcaatacacaaacatgccccaccttggtacactcacatgccccgcctcagtatactcaccctgcctcggtacactcacactgccttggtaggctcacacaccctgtctcggtacacacacacactccactcgtaccaaaacccgccttgctacactcacacaccccaccttggtacacacatacggtcacaccaccttggtacactcacacactccaccttgttacactcacaccgcctcagtacactcacacaccctgccttggtacactcaccctgcctcaatgcattcacacatcacccttgttacactcaaactgcctcagaacactcatatgccctgcctcagtacactcacaccatccacctcagcatactcacacaccctgcctcggtacacacatacacaccgcctcagtacactcacacataccacctcagtacgttcacacacaccacctcggtacactcactctgcctgagtacactcataccacctcagtacactcacataactggcctcggtacactcacacataccgcctcgatacactcacattgcctcagtacactcacacaactttcttcggtacagtcacacaacctgcttcagtacactcacacaccctgccttggtacactcacaccgccttggtacacttacacactctgcctcattacactcacactgcctcggtacacccacaccaccgtagtacactcattccacctcattacactcacactgccttggtacactcacataccctgcctcagtacactcatcctgcctcgcactcacacaccacctctcattacacttatactgcctcaaaacactcacaccctgcctctgtacactcacaacccacctctgtacactcacacaccccgcctcggtacatgcacacataccgcctcggtaggctcacacataccatctcggtacagacacacgctgcctcggtacactcacagagtcttggtacactcacataacctgccttggtacactcatacacaccgcctcagtacactcacacaccgcctcggtacactcacactgcctcagtacctcacataccgtctcggtacacacacataccccgccttgatagactgacacacaccacctcggtacgctcacactgcctcagtacctcacataccgcctcggtacacacacataccctgccttgatagactgacacacaccacctcagtacgctcacacagcccgcctcggtatactcacacaacctgcctcggtacactcacacacctcgcctcagtacactcaaccgcctcagtacactcactcacaccaccttggtacactcacacaccccaccacaataccctcactttgcctcggtacactgacacataccacctcagtacactcatacccattgcctcagtatactcacaccaccttggtacactcacacaccccgtctgagtacactcacacaccttgcctcagtacactcacactgcctcggtacactcacacacaccacctcggtacactcacacccctccttgttacacacacaccttaccttggcacacaccctgtctcagtacacacacacaccatctcggtacacttacacaccccaccttggtacactcacacaccctgcctcagtacactcacacataccaccttggtacactcgcattgccttggtacattcacacaccccaactcagtacactcagaaaccatgcctctgtacattcacacaccacaccacctcgttatactcacaccatctcagtacactcacacactccatctgagtacactcacacaccttgtcttggtacactcacaccaccttggtacacacacaccttgcctctctgtacactcacacacccccaccttgataccttcacatacaccacctcgacacactcatacaccccgcctcagaacactcacacatccacatacacccacacacaccacctcagtacattcacacaccccaccttggtatactcacacaccccaccttggtacactcatacaacctgcctcgctacactcacacgcaccgcctcggtacacttgcacacccaaccttggtacactcacacacaccgcctcagtacacatacacaccccgcctcagtacactcacacaacccaactcagtacactcacacgccccacctcggtacactcacacaccccgcctcagtacactcacacgtcttgtttcagtacactcacacgtcccacctcggtccactcatacacactgccttggtgcactcacaaacgctgcctcggtacattcacacacaccacctcggtacactcgcacacccaaccttggtatactcacacacactgcctcaatacacatacacataccacctcagtacactcacacaacctgcctcggtacactcacacaacccgtctcggtacactcacacacctttcctcggtacactcacacgacttgcctcggtacactcacatgccttgcctgtgtacactcatacataccacctcggtacactcacacacattgccttggtacactcacacactgccttggtatactcacacactttgcttcagtacgctcacacacccgcctcagtacactcacatcacctcggtacactgccataccccgcctcagtacactcacacactttgccttggtacactcagactgcctcaatacattcacacaccccacctcagtccactcacacaccctgcaccggtacactcccacaccgcaccttggtccactcacacacaccacctcagtccactcagataccctgcctttgtccactcacacaccccaccttggtacattcacaaaacccgcctcggtacactcacacacaccaccttggtacactcacacacaccacctcgttacactcacacacactgccgcagtacactcacacaccccgcctcagtacacttacacaccctgcctcggaacactcacacaaatcgtcttggtactctcacactgccttggtacactcacatacccacacgcactgcctcggtacactcacacaccccacctcggtacactcgcacaccccacctcggtacactcgcacaccccacctcggtacactcacacacccctcctcggtacactcgcacaccccgctttggtacactcacacacactgccccattacactcacacacactgccttgttacactcacactgcctcaggacactcacacatctcacaacggtacactcacaccacctcgaaacacccacacacaccacctcggtacactcacacaccctgcctcagtacactcaccctgactcgtcacactcactcaccctgcctcggtacacccatgcctactcggtacactcacacaacccgcctcagtacactcacacaccccacctcagtacactcacacaccttgcctcggtacactcacactcctcatcttggtacactcacaaaccatgtctcggtacactcacaccagcttggtacactcacacagtgtcagtacactcatacaccctgcctcagtacactcacacaccctgcctcggtacactcacacaccctaccttggtacacttacacaccgcctcggtacactcacacgcacactcagtacactcacacgcccgcctcggtacactcacactctttgtcttggtacactcacatgtcccacctcagtacactcacacgccctgcctcggtaccctcatacgacctgcctcagtacactcacacaaatgttcacagatgcacggacagttacacatgcgcagcgaacgctcagcgagttgagtccaagggtctccggttcttttgttctgccagtagatgcccttctcttatgttcccagccctgagaaaggctgagtttggggactgcttgtcagatgtgccgagaggcactttcagacattttcgtttcacacacttgggtcaccgaggccccggcccctctgcacacctggcgttttggcccagatgagaagagctccattacccattgtcacccagccgtccacccatctccctaccaggtctgctgagtgcctgctgtagccacggcagcggtgggctctggggtggatggagacaagcccgtcagcctgtatggggctggtcatggctgtgcagacagcaagcaatgatatccttgcaatcgagtctagtgctcacagagtaaccaggcagtgtagctcggggcactcggcctagtctgcggaggactctcctgagggcatggcacttgtggggagcaccctgaagatgacaaacgtggagggggagtggcaagagcagccgggctgagggttgtgcggagaggagcacacgggccagtctcacggggcttttcagccggcactaggggttcggcccctttccaggggcaatgggcagagcacggtcagacttgtgacctcctgagctggacacaccagcagggacagccgtggaagttttctaggcagctttcacaggaaccaggcgagagaccacacggccttgacccgggcagtgacgcggggtagaaggaaacgcacggcttggaggggactttgggggcagacccgaccggatgcaaaggtgggggccaaggcagaggacgaggtagaaagtcacccctagagtttttgcatgaacgaggttggtgaggtcttttccttgacaagaaaacccagtggaggagtcggggatggcaggcaggacatttccacaggctttgtggggtctgaagcttgtataatttgggacccatctttaagaaaaataacacaaaatttaaaaaccaaggtgcgggcctccaaggggcttgcataggtgaggggcctggcatcccagaggagggcagcaaagggaagggtgtggcagggatgccagctgcgggcctaagaaatggcccagacgggcctgagggggaggtgccagggggaagcccctggggtggggtggggaggcgaaggatttaaataaacaggtgtggtgaatatttccagtttttcacagtaaacctctccagcattctccccagacctcagtaagaggtggaggagcaggctgctgggaggggctgggggcccggctccacggcactgctgggcaggtgggcagcacatacccatggtggcagagaagaagacgatgcccagcacattcatgccatcgctggtgcccggctctgacttgtaaacgacctcgggcggcggggtcaggtccagggcgaagttctgcacatgggagccattctcctcctggaccccgtagatgaggatccgccgaggaggggcctcctctggtgccaccttgggggacttgacaactggggtggtcttggtgcggtactggtgggtgacaccccacccagagagaagtcagggccaagggttgttactaatattaacgacaacaataatagcatcttgaaggcacatttgtatccattcctatcctatttgattgacagtaaccctgtgaggcaggcagagcagggattgctatcaatattttacccaaagaaagctgcaactccttcctctaccaccacaccacccagccacgctgcctcctgccttcattcctcttcttacttctatacctcatcaccccatctgggtccctcttaactgcctgcccagccccttatccacccaagtaaccctttatccacccatctgtcccctcccaatcatccagtatccatccacctggtggcctgctggccctgctgcccaccaggtggaaacttggaccttctttttgaagaagcatagcctgccccaagccttgttaatgagatgaagcccatgcacaagaaaatgaccttcctgagccacgtacctttccctctctgcccccagagcattcatgggtctcaccccatcatccctcaggtactgggagcccaaaaagggagcctcctctcccctcaaacatcactgcatcgataaggccaaccactcaggaaacatatgagacctgaagtctctgcttccttttcctcctctgtaaaatgggaccgtgatagcatctactgcatgaaatgaaatgagacgatgtatataaagtgcttacaacagttcctggtacatgttaagccccatggaagcattactgctaccatcatcgtcatcatcacgttgaacactctgtgctggttgctggagatacacaaatgaacctgacatgatttctgccttgcggagggagtgactaattggctgaaagagttagcttcacaaagaaggggacatttgacttgagtcctgaaggatgggtaggagtttgccaaaagagaaagggcattccagagagttacagagtagagcaacattctttctctttatctctcacaccctcaatgattcccaattacaatagaaactccctagcctagcattcagtccccttcacaatctggcttatttcatggatgtcaggagagacgcggcgatatgccaaagctttcacagctccctattcagaagcctcctctctatacctcagccacttcctttgtgtccccaggctcaacacagggcccagcccaggaaaggggttcaggaaacccttgctggattaagtcaaccaaccagctgacagtttagaaagggaaaaagaattggaaattattcaaagggcaggcaaagactgagcacaaggacattcaccacaatttcgacgaaggaaaaactttgaaaacaacctaagggaacactgaaagggggagtgggaaataaattacagcgcagccttatcacaggccattgtagtaccactaaacattgtacttttaagaaatatttcataaccggggaaaatgctcaggatataatggaagtgaaaaaaagcaagatgaaaactgtatatgcactatgattataatattatttaaaaataagcagaagaaaaaagaccagaaatatatcctctgctaccagggactatgtactagaactagagatgatttttgttttctactttatattgtttggtattttcctaattttctacagtgaacatcattattattcttgttaggggaaaaatgattactttaaaaagaaagagaaaacaggctaagaagataggcctgggtttacctactggctttgtcatttactagtggtataaccttgggcaaatcattgactcctcggagcctcagtttcctcttcaggaagtggggctcatcctacctcagtgccgagttactgtgtggatgggcgagatggtgtatgtggaagcagagcaggcactcagtgaaggcttctctccacccccacactttttcatcatgaaaactggaacccaggacagggatgtggccatgggggtctctaaggatctaggttccccagcgtaccctcccctctagcatcccacctccagcagacagcgtgactggccagcacacctgtcacttcccagccatgccactagccctgctgcctgccctcctgcctgctgccccttccctcccctccactgcccagagactcactcacctgtttgaatgtggcttctactaggttggctgggaacatgttcctaggaagagaatcagcaattgaaaaattccagagcccaggacaggagggccctgggggttgtggccttggggtcatctggacatctcctttggtggtcgggccttcctcaggccagcctcctctgcagtctcacccactacatcatggacactccacagcgccagcacctgccgcccccagactgtgccacatactttccagagccaggcatttgtctacactgttccctctgcccggaatgccctgcctgcctcttggtctggtgaactactcaaatctaccacagatcaagcacctcttcctctgtccagccctccctgactgccccacgagaccctgcggcccttctgtgtgtaggtcgctgctgctccgccacaccaccgtgcggtcactggctcacctgtctgcctcccccatatagtggccgccttgcaggtgggacttggttgttcatgtcctatctgtggggcctaacacgggacctcgcacataggtgggctcattattcttagtaacatattttattataaagctaaaggtggaggagtctttcctactagataaaaaacggtggctcacgcctgtaatcccagcactttgggaggccaaggcgggcggatcacgaggtcggagatcgagtccacggtgaaaccccgtctctactaaaaatacaaaaaattagctgggcacggtggcgggtgcctgtagtcccagctactcaggaggctgaggcaggagaatggcgtgaacccggcggagcttgcagtgagccgagatcgcgccactgcaccccagcctgggcggcagagcaagacaccgtctcaaaaaaaaaaaaaaagtaactgtcaaactgtgatactgacacagcagtcgatggaaaagtccatgtaagctgtagcctagaaacagaaactagcacctctaagtgtttcgtacttgataaaagttgtttcacaaatcagtgaggaaacgaaggattcattatagaatgctgtgcagctgaccaacggtttggaaaaaatagatgttagatgcttacaccaaaataaattccaaaaggtttaaagaaataaataagtctttgaaaaatgaaaccagctgggcacagtagttcatgcctgtaatcccagcactttgggaggccaaggtgggcacatcacctgaggtcaggagtttgagaccagcctggccaacatggcgaaaccccgtctctactaaaaaatacaaaaattagctgagtgtggtggtgctcgcctgtagtcccagctactcaggaggctgaggctgcagaattgcttgaacccgggaggcggaggttgcagggagctgagatcgcaccactgcactccagcctggggacagagtgagactctgactaaaaaaaaaaaaaaaaaaaaaaaaaaggcaaagaaaccataaaaagctagaagaaatataggttgagatcttatcatgtctcagtataggaaatgactctctaagaacaaaatgagcaataaatcaatagattttactacatgaaaataaagaaatccctaagcgcaacatagcatcctggattggatcctgcaacagagaaaaaggacattcgtggaaaaactgatggaatccaaacgagatccgtaacttagttaatagtgttgtaccaatttaatttctcagttttgactaacgtaccctagttatgtaaaccgctaacatcaggggaggccaggtgaagggtgtgtgggatctctctgtactgtctacaacttttccgtaaacctaaaactatgctaaaatggaaagctgaatgcttgagaagctaagacagattgcaatacaaataaaaccacaaagcaagtgacgagctggagagactgcgtgaccaagcactaccatcctaaatctactaagagcttttacaaatcttggcctggtttctaccttcactatctcctctcatcagaatatcagctccctggagggcggaagctctgtgtttgttcactgttgtgtctccagccccgggaagagttcccggcacataccaagcactcagtaaatatttgctgcgtaaaccaatagaccacaaaaacccgacaggaaaacgatggaaagatactaccaggcaattcgtgttacaaaagaagaaaagtcagtggccaaaaatgctttttaaaatgtttagtttcatcaacaaattcaagatatttccacctgtcaaactgacaaagtatttttcaaatgacagtgcacaatgtgggaggtttggtgagatgggcaccctcacatggtcctggcagcaacctttctctaaaagcatttgtatctttgtcttcacagtccccttctaggagtgtgtcttgtgagaaatgccaactctgaggtgagcatctggtaagaggcttccgttgcatgcctgctcttcctccaacctgccgccccacactcacactgcctccacctgggtcgcctcccactcactcttgtcctcggtaaccctcttcccctctttcaagactcagtttacacacacggagaacatttggaagctcgtaagaagccaaatggaacttatacctatatagacatttctttacaacttcctttacaattacaatcattttaaatgtgggccttggcagggacagctagttgcctatgcagtctccattctcccgtccttccttaacagaagtcctattatgttgtggggaccaaatgggacctgccatcaagctctgattctcttgctaatggggtggccatcgagaggtgagtggaagtcgttgggtggtgattcctggaaaactcttaaggaggtgcccattcagccaggaccctttggtccgttcctccaactttcttctttctgcctggaacatggggataatagctagagcttgagcaaccttcatggaccatgagactcagatgaaagccaggtgctaagcatggcacggcacacaggagggcagggcctgggaccctggtgactgccagctgcccacctcccacttctggactgttcttcaggaacaaatgcaaaccttaccttacttaagcctctgctgatctggcagccaaaagcaagtcctgactcgtgtgtgctcatactaataaccaatgaatttatcctgcagattttaatcaagaattatacctttgattattaaatggggaaatgtacattttcttttggctttgagccttcacgggaagacttttctgcttgtcccatgaggtccgtgctcctggtggcagctacataaaacacagaacgtgcctggggacgttaatagccatgcctatcaaatacccacacactctgccctgtgcctccctgcacgttttctaggcagagccagagtccacctctcagctcccctcttcacctgctacttgcaaattctcaccgagatgcttccaaacccacccctaataacatgtccccaaaccaagccctaaaggtgggaattgttccttcccaagcacagctcctggaagcttcctccaatccctgagagggtagttgggagctataaatagagcccagtcattacttaatctctgtggtgttttaataagattcgaaaaaaaagagaaggggccagacctgattagtgctctgcttgggtttctgttttgcgtgctgcactgtgagcaggcgccagccttctggagcggccccccggagccctggaaaatgaattcctgtcttggagggtcatccagggacatggcctgttgtgttcctctggagtcatctttgagacaaggatgcagatctttgcccctgtggtgtgccttatgtccccacgcagtgggctcccactttccatttgtcccacttgccctggttctcagttctcttcctggtcatcagtgtttttgttcagtcttcagcacctggtaggcacctgttctgggccagggcaagggtcaggaggcccctggtccctcactgccagtgtccccatctccttcacagcctctcagagcatcaggagtggctgtcagtgcacccacttgtccgtctgtcctaagatggtgggcagccctggggtgggggcgtgaggggcatttgtacttgcttcccagctcccagcacaatgtcttcacccagagcagcagctgaatacagcggagctgaatggaaaggaagtgactgtgctcctcccagggcaccccatccatgcctctgctcaccttctgtccactccaccctgctctaatccatccttcccaaacccaccagcttcccattcccaaagcctaacagccagcccctcaacctgggcctcctgtcttcaaggttgggctctgcccagccctcccaacctcatctcccagaacccacctccagaagctttggttcatgccctgcagcctcctcactggctcataggcctttgtgtttcagaaccacagagctagacgggatcttgaaaatcactggggaaactgaggcctggagaggggaactggcctgcccagggccacacagtaacttattattatcagagtggagatgaggccacaggtctcctaggttctggtttcctgtcccaggacgcctgtgttctctccctgtagccccgctctctgaccaagaaacggtgagagcgaggcccaacacccagctttgcagaacaacttgcctctgggttgagagcgggtggggtagggctggggcgtggggggtgcggctctaagcagcaggatcagttttcaccacgtgaaaagcaacccaagagcaggaaacactctggaacatttgactgtggcacgtgtttctgatctggagccccgcagcccctgagtaagggcaggcagtggtgaaggaggcagcaccgatacctccttccaccatgtggagaagccgttctgaatcataagacccaagaaaccatgaatcacagttaccagatcctagaaataacagatcttacaaatgaggtttcttgaagttcctctttcctcgtctttaggatgttcactctcctagttctcctcctgcctctctgcttgcccctgctctgtttgctgtgcaaagcccacagtgcggccgtgagccaaggcccgtcctaggcctctgcacctgcttgctgggcacattctccctggaccattccagttcctcctggggatcagaccccaatgccactgatgaccttaaaccccacgtgtgcattcagcaaactctgcgcacccactcggtgccaggtgctgtcctaggctccaggatacagcagggaacggaggttaaagagccaggcttcacagggcatattacattccagtggatgtgggaggaaaagaaacacgtagatatgatcatgttgggtagtaagaaaggctatgaggagaagtgactcaagagaagacaacagagaggcagagcctgggaggtctcaggagaggcgacacccaggagagatgtaaatggagtgagggaaggagctgcatgctttctgcagggagggccacccagagaggaggcaatgacacccagacaggaaggacaacgaggcgggtggggctggagccagggcagggaaagggagagttggggcggaggtcagagtctgatgtgtgtcagcaagtgcctgtaagctgcggtgcaggctacgactttgttgccatgtgctgggttgagagcaggttttgaaaaggatgcctctggctgcagtgctgagaacagaggacaggaagcagagaggaagcggaggccaggccagacactggagtgggcggcaatggcgggagtggcaggggaggtggaagggccatggcttgggatttggttttcaaggtagagctcacagaatttgctgaggaactggctgcagggtatgagagaatgagagatgtcagaccaagatgggcagggcgagaaaagggcagatttatggagaaatcaagagttgagcttgggcctgttaattttgagatacctctagacactttatgtgagaatctggaactcaggtgagagttttccaggctggagactaaattcggaagtgccagagtccagaaggtgttcaaagccctggtattggatgaagtcttgccagccaagtaagcaaacacagaacagaccctgcctggatctctttctggctccagaccctataggtgacagccacgcgataggaacagcatggcaaatatttgatgatccttagttcatcacacactctaaagggtaaaagagaagctgaagatcttcctggagaaatgaagggagtggtagactgattgcatcgatggcctcggtttgtagactccatttcccttgtaacattgtggtcccttcccaccctgagtctgggcttggccacctgacttgctttggccaagagggtattagtggacttgctgaaagcagaggcttgagaaacatttgcatgttttgatttcctctcttgctcctctacctttgttattaaaaaaaatgcctgggctagctctctcctggaatcctgtcgccaccatgaaacaaatctaggctggcctgctggagtacaaagatcacagagtatagctgaatcatctcagccagactcccctagaccaactgttccccagttgagccaccagctgcctgcagacatgtgagtgagctcagtccaaaccagcagaactttccagctgacctatagacttgtggctgttgttttaagctgataaatgttgggttggtttgttatgcagcagtaactagctgatacagggaacgagagtttctttagacagtgggtgggagcctgtgtatgggcatctatccccacgggggaggaaaggaatgcttctccacaaccttaagccaagagaactattcagagaccttggcttgagtctcttagaatttgaggaatgtaggggctggtgcctgactcatgtccaaaggccctgggaaaggccagcacttccaatagggatatgtatgcttcccatgggccagacatgacccaacagggtcacccagaggggtgaggtgaccccagcagaggagtcaaccagagccctggtctaggggatgttgtaagtagccagatggaataaattgcctgagtccaggggacagcaggtgagagatgcgagagagaagaggggctccagagaacccatagaagtagtcctggagagacacaacgagggagcacctgctccagctcacccctctcccagtctgggcagcccttcctagcccactccctcacctctcaccagggagcaggcagagcaggaaagagaaacaaactcaccacgaccctcttcccactgcagctttcccagtctgagtcagatccaaaaggctaagacaggcttagtttaaactgcaggagtttggagttttaatgttaggcctagacttcttagatctgaaattgaccaggaagtgagaggtactagaaggtgttccctgagcgggcttagtggggtagcctgtggagcccagcacaccattcctgggtggggcttcccaggctccatcccaatccctgctctctcaccacctgtcctgcaagagcccctctgccactagggtagcacctaacacctctccctggcgatttccaaacctccgtctccagcttagactcccccatgagattctcatccactggccaaccatcagttgacacctaccccaggatgcctgcacctgctccagaccatccatcgcttggtgaccacaccaccatccacttggatgcgtgggccagaaatcttcatgctgggtgatcagcacacctcacctcctactcacccacctcctgctaaggatccctcctgagcagccctgccatctgcccccttccccatccccagggccaccacttggccctgtccctggctctgccttcccctcctacctcccctgcaactctgatccctggtcagattgaaccttctgaattggatcatgccgcttctctgtataaaactcattttctgtggcctttaggatgcaacttagcttttggcctggttcacggtgcactttgaggccggtccccacctgaattctccagcaggggtttctgcctgcctctcaccccttctgctgtgtcacactgatggtgctatgccttctccccgcagacggttccctgcagctcaggaccttcgcacagctatcgcccccaggcctgccctccctgcctccccatcttcccctcccttagaagggcagtggcttcctgctctcaccggcagccccagcttccccattgcagccccaggcccccatgttgtccctgtctgctcgtgggtctgaccactcctccagggcaagggctggctctgagtcccctggtccagggcctggcacagaactggcactggtgagggagcgaatgcacgaaggacaggagcaggggtgacctgcaggggacccggggaaagggagtggaaggtggctgtgccgctgggtctgcagtgcttccctggagagggagcctaggtctgagaagcaaggttagctgcactgctgtggctaggatgtggcactgccattgctagggggtggcaccacagggcaaagggcattgtccttggagtcagacaggactaggttgaatcctgtctccactacctacctaccggtgactctggaaaagtcacggcacctttttgagccccatttcctcatctgtaaaaagaggaccaataaacaaagggaggggccaataacagccagcctcccaccctacaggctgggcatcagcaaatgctcacagatgtctgctctgcgcccatccacaggcagagaggggcagaccccgtccaggctgcaaggtgcttctagcctggtggggcagacgatgcagcatgagcccagcgggcagcccagagctcaacccaccagggtgatcatggactccgtgatcacccccatctccacaccccgtcctggcctctgggggacctggcagggcaggctcgggcctggcgttcccaagcggggtgtgggtggcaatagttaccggatgaggtccaacagggcatcggctgagctcatgatgggcttcccactctgctccgtggtctccttctgggccgcgctgcctgggtggatgatggagaccatgaagatgcccacgatgacagccatgaaggtggtccacaggtagtacgccacggtgaggacgcccaggcggctagaggtcttggcatccagggaggcaagtccggacatcaagctgggagggcgagggggtcaggggctgtggtggggaggccagggcctggctggcactcagcgctcactcagcccctcctggccatgtccagctgcctcacagtgctccagggaaccccattcttccaacaatccagtcctgtgctccttccagcctctctttctgctctgccctctcccccacgccccggggcgcaggccacacacatctgtgccttgagacctctgcactgctaggcagagagcccaggccagggtggctgtgggatggtggggacactgttgggggagtgagagattaattaaggaaatgcgtgtgctttactttgttgcctcaagtttcccatgcttggtgtcctctcagaagcttccttcactctcctgacccctgcccagccaggcaggaccaagcttggtctacctctgagatctacctgcctctcccccagagtgaggagcccattctaggacccccacagcccctggctgctccatcaggacgctgcctgtctgtttgtgagaggagggatgagtctgacttccctgtgggtcccgagaggacggcaccgcaggcggttcctgcgggctcctggacgagctaatgaggagtgagtgagagcgctgggctgggggctggtgacccaggtcctagtcccagctctgccaactggctgtgtggcctcaggcaagcaagtcacttccccatctttgggcctcaggatctccatctgtaaaatggggacatcttgggtttgtgcctgggcccaggctccttgtcacagggggctgtgttgagagggctgtgggtctctctcctctcggctcctccccacccctagccaccctggcctgggctttctgcctaccagtgcaggtcagccccagagtactggcgtcctggagccctggagccctggagccctagagcaacgcttcttgcagccattgtggggggtgtgggacggtggggggtgtggggtgaagtgagattaattaaggaaatgcttgtgctttgctttgttgacaaaaggatttttccccaaagccctttcattctttcagataaagaagtatttgtctggttttaatcatgtaaacaagagcagataatccccagccacgctcctcttatcattagattccatgcagcagcatccagccccaggctgagcgtgaacaccggccccctcccccagcgggagccaccgcctgtgagggccctgccctgcctgctcgctggcgcaatggcttactcttctggtaagacacactttgagcatcccctcttgcaggaagccgtctctgaccaccaggctgagtgaagcctccttctctggctccacagtccctgtgcctcccactgtccctgcccccacctcactggactgcggactctttactggaagcacctccagggttgggccaggttctgattgaatgctgggtccgcagtttggtagcagactgctgagtgaaggagtgagtgaatgaatgaatgagtgtttacaatctctgctcatcctcatctgccaggatgccatatgttagtgatgggcttagggtgggtcttagacataaatcctgaagggctcataatgggattgtgcagccagaggaaatggggggctgccctgcaatcatcatcaaagagagattatcccacgcagggccggtgcgtcaacccagggccaaacagtcctcccaccatgacagaaccccccgcagtggggtccagccgcctcaggccacagggaagccatgtacccgagagcaggccctgcctgaggtcacacaggacagcagtgcccggctgggccagaactcagggccagacccaggcctgtcctccttcattcacgtgcattcaaacctttcgcacatgcccactccgtgccatgccctgtgcccacaggaagaaatcagaacctgtccctgacctcaaggagttcctaatctgccagggaatggggagggagaaggaaaggacactgggccacaagtgcactcaaatggcccctggactatgtgggagcatcagaaccgcaagggaagcggggacaaggaaatgctgtctttgttcagagaagggggaatcacttcgagctaggaaagtcaggaagggctccctggaggaggtggcatttgacctggctcttggaaatgggagaggatttggagatggggcagacatgcgcagcagtgagacagtggaaggcagaagggaggctggaaagtgtgagacaccgtgctgttcgatgtggcccgagctcaggtaatatctgagggttagtgacagattggtgatagaagggatagagaagataggctgagctcaggagtagggtggccttgtggcacttcagcacaactcaggcagcagaatttgctggatgtctagaagggagaacgaaaaattccttccatttgagaagatcaaagtacacatggtgtactgggagggtcactgaagtagtacttgtaagatcaaaaacctgacctaagaactcaccaatgcagattagataggaagggacggtatagcagccatccggagtgatcgtgtccctggaagggtgttcctaaatcaatgctaagtggaaaagcaagttaccagattgtttgcatctctgcagtgagccctggaacctcctgggatggtggactccctccagatttgcagtctaggcacatagatgtgtctgagggattgtgtggagtggggtgcaggtgaggactggatttcaggaaaggataaaggcccctcagaaggccccccaccggggacgaagaggcctaacacgggggtggcgccaactcagggacagattgagatgtgggagggagtgtaggttttagacagagcaagagggatccctgaccccaccctggggcccccatcagctctggacaggagagcacccatggacgaaatggagagaatcctgggacccaagtcgttctgtgctggagcctccctcccttcccacaaatggcggaagggagaggtgagcagccgcgggaactgctggtgacagctggcagcacaggccagcctcccccggagtgccagggccaccgcaggtgagggcggaggccaagaagaatgggagctgggcatgcagaggtcgtggcttccactcagagctcacaggcacagaaaggaggtgtaaggccctgccctttggctttttgagggattcctccctgctgaggctcctcaaggtcccaggcttcaaggtcaagctgttaaaggtgacttttctgagaacttgcagctggtgcccagtggtggtgggagaccaggtcgcgtggacgggcacggaaacaagcaaactctataggaaatgtaattattatctttgggtgttataagtaatttttgttttgtttcgaatagtccttcacattctctattctttctagattgagcccgtcttcttgtgtgatggagatgacacctcctggaggacccagcagcctcagaagccatcatctctctgggactttactgttccccagacacctgaacacccagcccagtggatccttaaccttctgagtgaagcactgtggagttccactgcgagccacatttgtaatttagaattttctagtggtcacattaaaaagtaaaaagaaacaggtgaaattagttttttggtgaaattaagtttaatactttatttaacctagtttatcccaaatattatcatttcaatatgtcatcaatataaaaatttttaggccaggcacggtggctcatgcctataatcccagcactttgggaggctgagacaggtggatcacctgaggtcaggagttcgagaccagcctgaccaacacggtgaagccccatctctactaaaaatacaaaattagccaggtgtggtggcgcatgcctgtaatcctagcttcttgggaggctgaggcaggagaatcgcttgaacctgggaggcagaggttgcagtgagctgaggccacgccattgcactccatcctgagcaacaagagtgaaactccgtttcaaaaaaaaatttatattgcttcaggttttaaattttaaattaaattaaataaaagttcagttcctcagttgcactgcctgcttttgggtctcagaggcctcctctgactcgtggctgttgtattggacagcccaatacaatagttctgagttacagatggggaaaatggagcacagggagatggaggcaactggccaggccctccagttggtgaaccataatgtcaagattggaacagggatttctgattcagaaccttgtggggttcccactcccacagtgcctgtctgtggcacaaacctggtttaactctggtggtgggggaaaagatctggtttgggctatgattttattttttattaattctttgaaacagggtttcactctgttgcccaggctggggctcagtggcacgatcatggctcactgcagccttgacctcctaggctcaaatgattctctcacatcagcctcccaagtagctgggactacaggcactcgacaccatgcctggctaatttttaaaaatttttagtagagatgggggtatcttgatgatgcccaatctggtctggaactcctgagcccaaatgatcctcctgtcttcacctcccaaagtgctgggattacaggtgtgagccacccagcccagctgactatgattttaatgtgatccagcccatgtaaagccattttagttcaatctcggagttcacagcctgcccttggtaatgagcctcagatttgtggtggtgagcttcccattgttggaggcatccaggtggatcctggatggccacctgttgagatgctagatggaggcttccagatagagtgggaggttccatgaggatgacttcaaacattccttctggctctgtgatttatggtgaggggagaataggcaaccacctctctcccacaccacgcttggctgggtgctcctgggagcacctgcggtgtttgagggccccagggaagagcctctgggagtctggaggctggaactccctcctaagccatctggccaccactcagagcccagggattgtggatcaagagattgcagtgattagagacattaacccgcagaggcagtgggaaggcccagcctgtctcaatctggtaattgctccacttgcaggggtgggggaagggaggcaaagactgccaggctcccggtggaaggagaaaaaggctgctgactgaccctcccctggttctcgcaccaacccctgaggtgggactcctgaccccatctcacactgggaggtgcagggcagctctgccatttgccaagcgctggttacaaaggtgagggattagaaaccacgcccccacgaagtcgaagttgtagtcgcacctccctacagagagagccaagagagcctgcaggctgcccagctgccggatgcccctcccccagtttggggtgactccccattgccctccgcaaccatcccagctccttccctgccctgcgtcccctggggctgggccgctctcctcctcgtccactctgctcctggaagtacctttgcactggatgttcctcccgcctggaactctccatccaccatcccttccccaaccctggcccaatgtccccaaccctgggtcagcttagacatcactgcctctgggaagccttccctgactgcagccatctcacccacttccccagggcaccctgtgcttcccagtttgttacggagcaccctgctagtgggctcaacccgaatccccagggcctgacccagcacctggcacaggacgggctggcacggagtgccgggagcccagtccccgccttcttctcctttcctgtcctgtggatgctgctcagctctgaagtctccactcaggcaccaccgccctctgaaggctgccctggccctaggcaaggcgaggaagctcccgtaagcatccctcactcactgcgagcccttgggcatgtgactgggcctgggtgtgcctcagtttccactgaggatgagtgcggatgatgccggtttgctgtgaggccaaatcttgggttggagtggtacatggcatgtgataagtacgcactgcatttcaattgttataatttcctctgtcttcactgtctgtctgtgaccacctgtcccagcagactggaactcctccaaggcaaggctaagtctagtttggctctaggtccttaaaacccaaggtctggcacaggcctgggtgcagggttgctgatgtgtgtgatgctgaaccagggtgacattctagatcagacgtgaaaaggacgacttgtgtgcccaggtgactgagcagccattgaaggtttcctgagaacagatcaccagtaccagccttggtccccggatgggcttaggggaatgcccacggtgttgtgtgtctgtgtgacatcgagacagttggcaccagaaatctgggaagagatgggggcttggtgaagggacaaggagctgaatgtcctgggcagtagagagggtgtctagagatcagcttcaggactctgctttcggccctctcctttctggtcattttaatcaatggcttggccaaggcccccgacagcatgtggagcagatttgtagaggacaggaagctgggaggaatagctaatgtgctggatgagggagttgggaatccaagcagaccccagcagtcaattctgacacaatgagcctgaacacagacatgtgttgggccgcacttggcttccacagcttggagtgcacaaacaccggggtgggagggggaggctgagccgtggctgcacacgtggggaggggactttgggctttgtttgctgccagctggtgagtcacctgggacgcggggctgccaaagggctggtgggccccctgcctgtggcttcagaagcccgggggctggtggaggctgctgcagacctgctttgactcattgagaaagggacggggcggggtgtgtgtgtcctgtagagggcagctgggtaggcagcaggtgatagaggcacgtgcctggttgcggggagcagctggggggctggggggcaggtgctgtgtggtccggagcggagcagacctgggaatgctggggatgatgggaaaagccctagggctctcagctcagcaccaggaataactttctggcagagctgtcctgctctggcaggaactaccttgagaagtggtgacctcccagtcactggaggtgtgcaagcaacttgctaaagtcacacaataagtgggttcaagccctagtctgctggcatgacagcatccagtcacaacctcctggcagtgggaggacctgagggacagtgaggagccccaagccctgcagccaagtccttgggctctggccttggctgacctagccacagaggctctccccagctggccctgggatgcagctgcaggaagtctaccagacaggccgcaggaaggaggcttcgggggtctgcgggcaagaggggtcccttcagtccatctgagcatcatggcttactcttcttttcccctgagcagaaggcaggcccaacagctgacagccagtgccatgcccattagcgccagctccaagtcatgcttcccagacggctctgccaaagccccacactcaagccgactcctcctgaggcctaaggcagcatgcccagactcccactcagctaaagtctgggccatctcgtctcagcacaccctcccaagggcagaaattcctccaccacctctgcttgcatatctcagaggacagagcactcactaccttctgagtcagcccctccactaagagctcgtgatgcttattaggaagtccttcctggtgtcacaatgaaatccgcctccggggaagagcattgggccacactgggcccagccagccctctggagccacatggaccaaacctcttggcctccaccttgatttccatggagggaaggtgggagagagtgtggggctcagagtgtgggcggtgggtgctgctaccctggcatgccctgctgccctctgaaggtccctccttcccaggcctgggtgccaagagggcgctccactgggacctgtgagaatgataagcttgaactggatcaaaagcagaagctggaggagccacagctgcagccctcagagctcactgtcagactgccggccattctcaaccattctccaccaagaaggctgcattccctaaggcagtcagggccaggtccagtttccaactccacgtgaactgaatcccccaccccttccttgcccatgtggcaaagatcatgaggagtcaggggaactcaggtctcctgcctcccctccctgcaccagcagggcccctggagtctgccccgcacagggctcaggcggggccatcctgtgggcctctctccagtgcagcggttctccacagagaagggcggcagcacagttttcaaaacctcacccaccttcccaggctctgagatatgtgcccaccctgcccggtgttgaacatttgcactgggtgctgtggggctcagaagggaatgaggtgggtctgtgttcttcctggtgctctggccagcgggtggggagaccagcagcagagcaacaccaacccgggggtgggggtagctgtgactgagcgccagagcagggccagccctccgggcatcgggctgggcctcccagaggagggcacagctggatggagcctcgaaggccaagtaggaattctctaactggaagggagcgagagcatggaagtctgtggtgcaggataaagcctgggagcttttcggagtcaccaggctggaggtctgaccccacccgcagcccacagcgggccacgtttcccctcttgatgagtaaggcaaatcatctgactgggcagaagggccaaaggcaggtcccagggctcacaccagaaggttcagtggagctcgccaaactgtggctaccccctgactcggagggcagcatccgaagcacaggctgtaccggtttggccctctggccacccgctcctctgcctcctcctgctcacggcctgtcctggggagtctgggcagccccctgcacactggctcccaaaccagactttgacggctgcttggcccaggcccatttccaataagttagaatgtgggtgtttgggaattttctgccacactagagttcctcaggaaggggagaagggagtgttgagtttctctggccaaacatgatttcctgattctaagaaaaatcagtttaaagtccttacaagaaataggaaggaaaacaatacatacacaacacacacacacacacacacacacacacacacacacacacaacacagcttcacagacaaacccacacccacgcttggctgtctttgctatgttgtggagctcacagaacactctatcatgcacagccctagtgaatcacaaacacatggattcagtttcccctgaaggacgcctggtttaagaaactgaagaatgaggggagagaagggtttggcaaaaagcaagtggagaattggaggctctagctggatccagatgctggtctgacttacccctaattccttgtgtcaagcttgtctggggatgtgtgaaaacaaggctcagttgacctcccaaggtgaggtgcaaagtctagcctcagtggaatggggccataatgggccacacacacaaacacacatgggcacacaaacacacacacagagcacctgccgggacctgctttgtaaattagcagacagcattgtgcctattttatggctgaggctaagagggtgaactcgaggtgagaccacagtcccgaggcagggcagctccctcaagagtctagcagcctcccaagtgccttgtgacaggcaaaagactttgcaaactctgtgcctcccgagtgggtgagtaaaacaggatcaccaaggtgaaggtgcagcgtggaaattcttatgacatcacattgggggaaaaccaaagcaagcaggctacagatttatttttgtggaagatactttttgggttatactgtaagttgaaagcaaaaaggattggggtagtgacaagtggcctgctcggggaagaatgggaaagtaaggctcccaggccctgaaggcttgacttttctaaataaagatataattggcatggcgttagtgaactgtggcagcacacggaagacggctgaggagggcaaaaccatgggaggggggccccaatgcaggtcccgtccagatgattcgttcctatactaatgtaatgtgaggcagaattttctaatttttgtccaaggcgtctctgttcctgggtggacagagcaagttcccctgcaggcaattttattttgcaaagaatcttttgagcagcaaatgtcggatgagaaggcagcactgtcaggggaagggaggagctgttgtggcttgatgaatgcctcctccttgagaacttgagatctgcagagttatggaaaactgtgcccatttgcaccagaggatcagggccttctgagaggaaaaagactaagacctgagccccagttccctgtgatttgaagttagcaccagggtacgctagagtcccccagccgagatggcctggcattcaaggcctccaaaatgaacccagtaggagggaaaagggaattggggctcaactcccggggagctgatctcaggacatgactgaggctgctttaggaacaattattgagcacttcggggggacctaggggtctggaggcatccctgtggcctgagcagcgttgtgcacctgcaaggggcagtgtgcagacttccaccagagcgtgcgggacctgcgttccacagggccaccccgtggagggaaccagagcagcagggctggtggcaggaccccatgttccagctctgtttacaccagaagcttccactgaatgaaataagctgactgtggccacggggtggaggcctccagagggacacactgggcttcctgctagtacaggggagtaggaccatattcagtgtattcagtttcaagtcagtaaagcaaaaacaaagtgtaattaattttgcctttgaaaatctcttaagttgcccatagagtccaggaggtatagttttgtgtaagttcattcaagacagtttcccttccagccttggagtgggttgctgtttctttaagcaaacaccagatgagagcatcagcatacactcagaggccgtgatctaaaacacccacccctctgcaggccctagaaactctctggcttcagggaggtgctcactgttcaggaggtgcctgggcacagcggctggtggaggcaattcaggccctcctctctcgtggccctcacctggggaagagcccttggaaggaggagtctcctgtctcatttaaatgattttctccctttttcagagcacatgtaattgaattcacttaagttaaatgcacatatgatgggactccactataaggcgggggtggtgggagggctgaaataaactgaaaaccgcaaacctggagttacgccgggttatacagttaaataactaaatgtacccaccagcaagcagatttcaccagtgggttccctgcatggtaagcccacagagaggctctggccagagcctgcatatgactgtccttgctggcaagtgtcttgatctctgggaatgaataaatcagtatgtggcatatttgattgccccttgctagcatcgggggacaggcccaaccagctctggggcccagacagttgggcttctgatcccatcagccaaggacctcacctcacatctggtgaattcaccagtaagaataagaacaaaccttgtagagaagaaatcacagtggcagaattagcaatgtggagtgagaggatggtttcttctctgttatccaaaatgtttgtaatttgcttatctaattttttttttttatgagataaggtcttgctttgttgcccaggctggagtgcaatggcatgaacatggctcactgcaggctcaaccttctgggctcaagcgatcctcccacctcagcctcccaagtagccaggactacaggtgcccaccatcatgcctggctaattttaaaagtttttttttttttttttttgtagagatggggtctcactatgttgccagggctttatctaattttttaaaatatgaaaacatctttaaagttcagctcctaactgtcctccagggcccatacaaatgctgatggtgagactttccctgaactctgctgccgctgccctctgctgcttcttattcattgaaaatgtattgatcaggcacaggcagtagcaggccctgtatggggcagtgagaaatcagatgaaagggggagagttatattcttcagaattatttttacagtaagggagcagtccttattcagaagaaagttcttgatgaactacttggacagaagctgagcagtggctccactcaacccaagccggctccagggagagaggtgagcagaagtgacttctgaaagacatccagctgctctggggacagaggaagagagaaggaaggttccaggagagagaaggaggtggacaggccctcaggccaccccgatgacccaagccctggtatatcctcctcccgcagtgtggcagtgcctgtgacttctatgagaacacaacaaggtggtgggatgtctccctgtggttatgtggtagaagactttgactcagaagactggtgaggaccgggcttcctgctggccttgatgacctacagtgctatgctgtgagctgcctgtggagacagctgggtggggagctgcaggcagcctctagaacctgagtggctccactgcacagctgtcaatgctgggccctcaggcagcagccatggggaatcacttctgtccatgcctgagggagcatggaggcggattctccctggttgggcctccggatgagaacagagcccagcggacacctggattgcagcctaagactctgagcagaggactcagccaagcccgcccagactgctggcccagggactgaggcaaccatgaagtgtgtttatgtcactaagtttgtgataatttgttacacggcaatgataacgaatacacacagacacacacacagagaaccaggagataactgaaggcactacttgaagcaaggaatgctggtgtgaatgggaagctgatgaaggctgcttggttgtaggagtgaagggcatagaaaagcaagaggcagtaagaataggaattgggcagggtgcggtgactcacacctgtaatcccagcactttgagaggccaaggcaggaggatgcctcgagcccaggaattcaaggccagccttggcaacatagtgagagccccatgtctacccaaaatttaaaaaattagctgggcatggtggcgtgtgcctgtagtcccagctaattgggaggctaagtcgggaggatcgattgagccctggagttgaaagttacagtgagctgtggtcatgccactgcactccagcctgagggacagagtaagaccctgtctcaattaaaaacaaaaaagaataggaattcatgacagataaggaggctctgactgtcatggcgcaaggaatggctctgggtgccaggtgagtgcatcatggagaagtgggcaggacctggccagggcccctgcggaggccctgtggatgtgcaggtgtgcacgactcaggtgaagcagggcatgctgcatggtctgtaccagtgttgagggagcacccgggtgtgcctcagtcaagggtggctttccagggcaggggacaggtgagctgcaggtgctaattagaaccatgaagatggaagaagccatccaaggggcttcctgctgagagcagtgacagaggtggccacgggctgggggagcattcatgacacatctgaggagcctggtgatgctttaataagttagaaaaacatgggacatctgccaggcatggtggctcacgcatgtaatcctagcactttgggaggccaaggtgggcggatcacctgaggtcaggagttcgagaccagcctggccaacatggtgaaaccccgtctctactaagaattcaaaaatttgctggtcatggtggcgggtgcctgtaatcccagctacttgggaggctgaggcaggagaattgcttgaacccgggaggtggagattgcagtgagctgagatcatgccactgcactccagcctgggtgacagagtgagactatgtctcaaaaaagaaaaaaaaaaagaaaaaagaaaaacatgggacatccataacgtaccaggagccatgctgggtcttcacgtacattctcttacttacttttcgtaataacctcgtgaaggaggtattcttcccactttatagataaggacactgaggctcagatgctaaaaggcttgtttacatttgcacatctagagggtgactccaaagccctgttcctgccctgtagcctttgcagatttcaaccacccccgcccatgcttcctgctcccccgccacattgtgacagatgaagccaccactggtcaagcgtgggctgcactcagttggactgaagcacacatgtctgaggagggacttgggccaggggctgggttggagaaattctagaaaaaaaagagcccacagctggaagatgccagattatgggaagagtgactgaactcagctccaaccccgctggccccactgccctcccactgggcctcctttctccagagcaaggtgtgcctgtgacccctccatggcagcccaggggcctttcagccctcacgtccacccttgcagtcacccacacttctttacacctcaccacctccctttgcttgttgtttagatctccaacttctgaacgaatctgtcacgctgagtaccaggcagaggtcagtgtgaaagacaagggggtcaatgacctgatcccctcctgggatctcagaaaaaaacaaagatgcacacgaccctgcccacggagggggccatgccgctggcccgaccccttgacagtggctttcttgttcagtgagatgagtggctcttccgaatagggatactagttggtttgctcacatagatgtcactactggactaaaagatgcctgtcccccattgtgtggcatgccagctgcgaccgtgaggtcactgagctaacgacactcagctcatgcaggtcacacacagcgtcagcattggagacagatcatcatccattttaccaacaaatggggaggtggaaggacttcccacacagaaccttgagctaggtcttgaatacagagtgagactttaaattaaaagaattaaaagagggcgtgcatggcaggggctgggcaggagcaggagtgtggagatagacccttgtggcatgctgtgggactagtgggtgaccagcctggttccagggcttggcatggggaaagggtggctgtttgtcctggagaggaggtgggaacagatgtcatgggagccaggcttcgaggcccagacctgcagatggttggaactggaagctggtgagcccaaatgtaaccccctgcccccatccccccactcccccgctactgccctgtagccaggacacactgcagaaaacccttgccttcctgggtcacagcttggagcccctggggatgggagcaccacagcctcctgctgggctcctaagctgtggagccagaaggtctgaccccaggacaatcaagagatttaaaatcctcagaatactttcggagctctgaaagcaaacctctgcttggaccctttggggttctagctcagtcagctcagggtcaggcctgacatctgaatttttcaaagcagctctggtgattttgctctgccctgagtaacaacctcacaccagagtggctgttcctcaaaggcagggacacccagccctgggctggccaggagcaagagctcaggggacagtgtggatggactcctggccaggatggataataggccagtttgaggccaaaggagggagagttcaggaacgaggggttttaggactcagaaatgcgtcatatctcccccctgaaggtttaattttcccttcataggaaaatgttaaagcggttccatttcttagtgacacggttgctctgcaccagtccaaactctataataaacaaatgaaatgtatgaacacgtcctggcttttctcaacttaatatcacatgcatttccagccaagagaacactgagtctggtggagggagaccaggcatttgagagccagaaggtggagagctggacgggccttcgttgctgggtaaagaagcccagggttgggggcctcacctcagatcacatgatcgcttgtggtggaggcaggtcgaggaccctggcctctgacttctgaacaggatttttttgttttgagtgacttgtccaaggccacacagctaatacatagcaaggccaggctgtgtgacaccagggtccatacaatggcctctaaggtgcctctgttctgagagaggggcaatgcccaggcagttaggacagtcagcaggaaagggcagacagaactgcctgccaagggtcctggcttcctccaccagtgcacttatttagctgttctgtgattgtctattttcctgtcagtctccccagcagtctgtgaacaccacaggacagtctctccatcatctctgtgtctgcagcacccagcacagggccaagtgtccagaaagcacaatgcatgattgcaggatccattaattaattcacttgaccagtattaatgagcacctactatgtgcctggcacttggctaggtgctgacaacacagagttgaatctaggcagagtagcctcgttaactttgcaaagcttacagcccagtggataaagaaaccagttaacaagtgaatgcatatagaatgacaacatatgatatgtgctgtggccgggagggaacagggtacagtaagggagagccagggtggcatgaaggggttggtggggagggccttcctaagaagatgatgtgcaagttgagatggaaaaaaagaggaagaagaagagatgtaagatgttggggaagcatgttccagaggaaggaacagcacgtgtggaggccctgagatggtaagggcttggtctgcttagggaacttgaggctggtgggactggagtatgtgacatgggatgaggtggggtgggcgaggcagatcatgcagggcctcctagaccaggttaatggtctgcaggttgattctacatgtcatggaagctgttgaaggtaaatgaggggcagggcccaatctgcttttctcaagatccttctggccactgggtggaatagatgggacggggacaagaagtgaggcgaggagaccagtgaggtggcggtggagtctggacgtgagaagagagtgcccgggcctgtagggttgggaggaagctccattcttcgactgagtaggcagaatccactggaactgtggatggggctgtggggttgagagaaagaggatagccaatgacaggcccgatggaagacctgggtgatggagctgccatttgcagacaagaagaaaacaggaaaaggaggcagttttctgggtggaacttcaagttggtgacattaaacttgaagtgtggctgggcacggtggctcatgcctataattcccgcactttgggaggctgaggcaggtggattgctggagctcaggagtttgagaccagcctgggcaacatggtgagaccccgcctctacaaaaaatacaaaaaataattaggtgtggtggtgtgtgcctgtggtcccagctacttggggggctgaggtaggaggatcacttgaacccaggaagccgaggctgcagtgagctgagattgtgccactgcactctagcctgggcgacagggcaagatcctatctcaaacaaaacaaaacttgaaacgtttgtgaaacatccaagtggagatgtcaaataggcagttggttaatgaagtatggagctcacaggagaggtctggggagatctccatctgggggcattgggcttgtaggtggtatgttaaagctatgaaattagatgagaaaaggctggagaagctgaacatttggaggttgagtagaaggagagagaccaagatggaggggcagaaagcaggcaaaaagttagaagagtgtgagtccatagggaagggcatttcatgagggcaagagtaatcagctgcacccatggctgtggagaggccgtgtggaagaactggacgtgtcgtacagattcagcaacacagaggactgctgaccctgacagattcacaggctcagtgaatgactccaaagatgcagaaagaggagacagtcactagagtgagttgaggagtcagggaaggcttcctgagggaggtagcatttcagcagagccttgaaggctgagtcctgagaaatttaaatgctgcttgcaaaggcctctgtgcagaaaatacaaagcgcccttggcctggggattatctccacttcacaaaggggggaggtccaaggagctggctcactgctcagcagcagggaggctgggaggcagaacgcatgcagaggctcatcctctttcctctctgcagaggagtcctggaagatgaagatttctcatggcctcagagcaaaaggctcttagacaccacctggagcagccactcattatacatctggaatactcaagacctggacagggatagggttgctcaagttcacctagcacatcagtgaaagggaccaagtgatctcccatgatttccatggcccgcaccctactgggtaaggtctgaattcttcagcctggtgttcaaggtcgttcatgattgggcaagagctcaccgtccaaattcatctcgcaccatcccgcccttgtccccaagtcccaacctcctgagtgctcagcatacacaacatatagtcttcatgacaacccttcgaagtaggtgttgttattcccattttacagatgaggaaactgaggcgtagagaggtgaggtaatatgtccaaggttacacagccaagccaggctgtgatcactggagtatcctcagagttagttctcttttccccaggccttgctgcattaccatgaacagcccctcctctgggaagccaaccctcaactccctggccttgagctatcttggagtcgggtcatatccgttgattccaaatcacctgttctatccactaaaaattctactggatggaaccaacaactggggccactgaatgactcagaagccggcagcccacggcactgcccataaaggccccacggtcacactcatcccagggcctgtggttgctctccagccacccacagcaggagcagggcagcaacagaagccatcctctaccctcctggttccggaccacctggtcaaacccccgctctcacctggagaccaccagtggcaggatcatcatcttcagcatcctcatcaggagctctccagggaactggaagtaactaatttcctgaaaacacagtaagaactggggttatagcaagagatgcagactgcacagtggttccgttcttcacagtctttgaagcactatcccatctgactcccctgtctagcacatggcagcagagaccatggagaaagaactggctttggagccacagaactgggttccaatcctggtaaacaccccgcctccaccaatcccccacaagctgtgtggccttaagcatcttctgtgaccactctgagttttgtatttttctcatctgtaacatgagggtaataactacagtagtccctacttattctcagcggacaggttccgagaccgccagtggatgcctgaaaccacagagactgaaccctgtggacgttgtttttttcctatatgtacatacctacgataaaatgtaattcataaattagacacagtaagagattaacagtaactaataatcaaatggagcgattagaatatactgtaataaaagttatgtgaatgtggtctctcttaaaatatcttccagtactgttctcacccatttttcagaccatcggtaactgaaatcacagaaagcgaaatggcggataaggggggactgctctgcctcacagggtcattggggggcttaaacgggagaatgcacgcaagcacttagcacagcgcctggatgacagccaatgtttggtaatcctgaaaataacagctctcctccatctgcaccacgcatctgcctagccatggaataaaatctctctcgtgtagcagatggcaggtgaccagaggacagagccgagtactgttcatgcattcattcaacccgcatcgtgccacgcatcacagtgggtaccccaacatgaactaggcagggttcctgtcctgagaagttcccagcctagctggtgaggagacccactcctaagcagaccatggccgccttgcgagtcagtttctccatctgttttgggtccattctctagtgcttctcctcgaaaatgctgagagagagaggatcagattgaatgggtgcaacaccacgcggtagaaacagccccctttggcagagttcttacgcctgaccccttcctaggccgctggctccagcctgtccacggatctctgactaaggcgccaactccttgcccaataagctgtctcgcaagtaacagtcacgtgaccaggacctgacaactgaagcagaagggctgctaagcccagttaaatcagactttcagataacaacatatagttcattcttatactaaaaaaaaaaaatgctgtttatctgaaactccagtttaactgggtgtgctgtttataaaattttttaacttaattcagttctgctacttctggcaaccctggcatggggccactttcttcagagggtgaggttgtgggcgaggcaggcaaatggactttcaaacatcatccaagttgaattgttgtacttgcaactatttttttttaaccaaagccaaacatactcggttgatgatctgatgctttaaaaatctccaaatcatcaaatgttggtgctatgaggggactcttgagatcttctagcccagcccactcatgtgatagatgaggaagctgaaccgcaaaagggaggtgacagacccacccaatgttaaccgcagcacaggaccaggactgctaacatttccaatgcaccagaaaatctgctttttaaagaaatatgcccatcatgactctctctctctctatatatatatatataaaataatatatataattatatattatatatatatattttttagacagagtcttgctctgtcaccaggctggagtgcagtgcagtggtgccatctcggctcactgcaacctccgcctcccaggttcaaccaatccccctgcctcaccctcccaagtagctgggactacaggtgcgcgccactatgcccggctaaatttgtgtattttagtagagatggggtttcaccatgtttgccaggatggtcttaatctcctgaccttgttgatccgcccgcctcggcctcccaaagtgcttggattacaggcgtgagccaccatgccctgccaacaatatatttttaattaactttagtccatatatttatataaacatatatataatatatataaacatatatataaacatatataatatataaacatatataatatataaacatatataatatatataaacatatataatatataaaaacatatatatattatatatatatatattttttttttttttttttgagacaaggtctcattctgttacccaggcaggagggcagtggcatgatttcagctcactgcaacctccacctcctgggctcaagtaatcttcacacctcaggctcccgagtagctgagaccacagatgtatgccaccaagcccagctaatttttgtattttttgtagagacagtgtctcactatgttgcccagactagtctcaaactcctggactcaaacagtcctcccagctaggcctcccaaagtgctgggattataggtgtgagccactgcactggcacccacatgtatatattctttaagttaaaagtgctctaatagccaggctcagtggcttatgcctgtaatcccagcactttgggaggccaaggtaggtggatcacttgaggttaagagttcgagaccagcccagccaacatggcaaaaccccatctctactaaaaatacaaaaattagctgggcatggtggtgcatgcctgtagtcccagctactcaggaggctgaagcacaagattcgcttgaacccaggaggcggggattgcagtgagctaagatcgcaccactgcactccagcctgggcaacagagggagacgctatctccaaaaaaaaaaaagtgctctactgataaaaaggcagctcttgcctcacctctctctatccctatcttgcaacttcccagtagtgaacatgctcagttcttctagctgtttcccatagtatcactatttctagataatatggtcataatgctatttcttgattcatcattttgacatctatcaatttccctgccatgattgatgaggagttagttcttactccctttctctccacctatttcagcattatatttatatcaattttttagtaaatcaagatttacaatgttttgatcgccaaacagtgtttaccattgagccaagtaatgtactacaaccatgtctccttgcttgtagcctaaagttaattgactgatttttatttgtcttgttttctgggaatcacccactaatttcttccaaacattttaacatgtctactaaactacctaacaatagtattttctgctctctcaagcacatcagttctcttttatcctgcctggggccttggtctgtgagctttccaccttcctgctccagtttggactgactgctctctaggcccagtgcttgtcatggtttccttcttggttgtcattctgggacttgtcctttagagggccccctgtttctgggatcctttgtcctcttggtttacttccttgttttgctgaaacatctcctttggtagctttctgagaaagagtggatgggagataaacttttctgagtccttacatgagtaaaaatgcctttattctacctttacctctgatattagcctggccatgtgtgagatacttcgttggaaataatttcccctcaggtttagaaggtgtttctcccttgtcttctagcttccagtttgcttaagatgttcaaagccattctgatttcctgttccttagatgaggttggttttattccaccagaaccatccaaagatcatcagtttatctccactttttggtaatttcatggtgatgggccatagtatggggttttctttcttttgtaaacaaaattgacagtgctatgcttgcctttcacttctgagaaactgcttagattctctgcaaactgtttctcctctatttttcttctgttagctgtctctaaaagtgtcattaggtagctggacattgaacattctaattttcttatattttctttttctattttcatttatttttgttctagtttctgggagatttctacaactttatcccagttattgacattaattttttttttttttttggagatggggtctcacaccatgttgcccaggctggccctgaatgcctggggtcaggcaatccacccgccttggcctcccaaagtgctaggattacaggcatgagccaccaggcctagccaaagtttttatattaatatataatatttgtacatatttatgggatacagttggtatattgttaaatacactgtgtaatgttcaaatcagggtattcagggtctccaacacttcgagtatttatcctttctatgtgttgggcagctactcacatttttatcttagttcttctatttttaatttccccagattctttcttgttctctgattgttccttcttttcacatcccctctgttgtacggtaactatatcttcactcgcagctccagaaagcttaagaggagatttacaaagcttccttctcctccccgccttgtctctgcttcactagagacccacttttctctttgtttctctcattagagacccccttttctcttcgtttactctgtttcacattaggagcctcctcacatttctggtggcgtggctttctgctcgtatgtaagtttgaagcgctaaacttctgcatgtatgagtagggtttgtcaactgacggccctcagggcagggtgacaggtgctgatctggctttttcactggggctgggtgggatggtagaggagtctcctttatagcagaatttagagatcttttctctgaggcctcagtgagagaagtctcttcctgcctttggctgaggaatgacatggtgcctaagctcagctgacagcgatctgaaaccgtgctggggaccccactcagacaaggatgtctgttaattagtttgaagtaggtgcctcagcatggccctctccccaacacacacaggggtggcccaataccctcaagtccagcttctctggttccttggggcaggcagtgggtggagatgggtggatgagtcccccaactgaattggaaggtccctaggggtctaactgctctggttacaaaactccaaaccatgcccaggctttcaaccccagcctcaccctgcctagtgcagcatcttgctctgttacgttctggagtctgcaagacaaactgacttggtatcaacttccacagactaagattccagctttctgtgaatgaggtcatcagctccacccacctccatattatctaatttgttgtagcctctctatttctttttctcaactgtctccttttatattctctttattcttggtggttttaccttttaaaaatcccattactaaaatgttagtggaattctaggaaggagggaaaaaaatggatacacctgtgattcaccatggtttaactggaagtctcaaaatgctcagtatttttaaatgagacactcatacaccaagataaaatcctgtgattttatcaaggataaaagttctttttcacaaatagaacattctaccattttccatattgtttatgatttttgcctgttgcataagcttacaaaacaagaagtgtttagtttctgagtcacaggcaaagagatcaaacagagaaatcccagatttcaaagtaagatgctgagaaagccagtttctgccaaataattgttctaagcctctacatccttccttcaatttatctggcaggttaatccagactggaatacatttgcatttccaaacagatgggaaaggcagctttggcaaagtaggccccagatgagtttggcttttaataataggcattccaatttgttttcacaaaataatcttcctgcaggagatatatttttgttgctgaggaaaattaaagagaacagattgcagatttttttgttccattgccagtttaatgcagcagatagttgagcgttctctctgtgcctgacacagggctaggctcacgttttggttaaaaaaaaaaacaaacccatatgttgttcagcaatatgcagcttggtgggagaaagagacacccatataaccagctctgaagccaggcagccagcagcggggttacagttactttcatcagctatggatgatgagatggttcctgatgtagataggactttaacaggtacataagggagggagggggaagtaacacgtagtaagcacctactgtatgctgggcattgatgaatccttggtttattcctcataataattctagtagacatatactgccccacatcccattttacagacaaggaaactgaggcccagggaggagagaggatattgcctagccatttgctagcagagtcaaagttcagggtttctctgcctccagagtccatgcttcttcctaaataactgctcgaggcttaacagggtcactatagtcgtggctcagttctccaggagtgggtgttttccttttaatggaagacaaagtctaatgcctgaccccagttgtagagatggcattagacattagtgagctgcgggaagaggactttctgggaatagggactcttccaggagcccattgacaaagcctctctccttgaccacactttagacaggctcctctgagccctcttttccactgggctttgtccttgggccttgtcttcagcctgcatagtccagctgtagcaaaagtcctgccaagtcagtttagtgaggatccctcaccctccagcatcctgatactggatcaaattcctcatcccagatcaatgtctgatcaccctggcctgccttcaacaagaatccccctaccctgatgtctcctgtagtcattttctgtccccgaccccctccctctgctcgctggctataaatctccagccatctttgttgtatttgtggttgggtcccatctctctccccaggaggtcttgataactacccccctaccacaatagtcctgaatagagccttccttaccagtttaactagtggcagaatgattttgtccttaacaccatgggaatgtccctccctctcctgtaggagatgggggctgacagggaaaggggctctttcccaggaaacgcagcttcttcatggcagttacacaggctggaaacccggggcctggctccccttcctgtcccccagcccacatccaatcggcccccacatcctgaagctcccccttttgaaaacagttctcacgtctgtcccttttgtctgcactgccgcatctcccccaggctgccccttctcggccccctgcctgccccagaatcaccccctctccactcagcacctgaggggtctcccaagctccaaactggcctgtcgctcttctgcccaaaagcatctcatggttgccgcaagcccacgtgtggcgatgggacctatgggcctgctggcctctgcgctccggccgctgcacctggcatctgctgtcacctctgcctagagcacgcttcctggatctcttgtcatttgagcagcctttaggaggtgttctctggtgcctgtttgaactcacacaagacccccctctttccccgccacagctcttggccctgtgtttgtcatcatgaggcaccctcgcctctcctcacctgatggtgctgggtttgtaatcactccccagccacatcactggttcttccctctagtcctgcaaagtgtttatcacacccatgttacagatgagaaaaccaggacccagagaggcagagggattcacacactgtcatggcaccagggagctgtgatgctagaacgggaccccagatccctcaggcccacacgcccctcctggacaggggtcccgagatgctctgggtggctgacctgtggtgagaggcgccgggtcctcaagaagaagccgaggaggcagcccacgatgacagacagcacagacaggatgaggagtccattccgcctgcacacgtccctcccccgtgccaagatggcatgcggcaccatggtgagcctggcctgctggcaaggggcacagcaccattccacgcatgagagcccggccgggggcacagggtctgggctgagggctctagcccctcagcaggcaggtggtcggagttgctaaacaccagtcgccagccccacggccatgcccgtgtggccgccttagagggaagccacaatcctattaccagctgcatcattaggagctgggagcagattagggcctgggaaattagagcagaccacgtggtctaggagttcaggcctcaaagccaagcgttcctcttaaacagttgagtggaccaggtactggaaggaacaagaggaacatttgcttggttggtttgatctttacccctgcttccttccagaaagaatcaaaaacaagacagtaagatatcagtttccctcaacattaattaagcatttactatgcaccaggtgccattctagaagagtgttacatgtactggcatatttaatcctaacaccaatcccaagaaataagtactattaatatcaccattttacagataaagaaactgaggtgggtgggtgcatgtgctgcgggccaggcctgtgctggctgccttagctatgccaatcatagggaattgtcccaaagatcccagggttcccaccttcatttttcagaaagggaggctgagaccccagaagccagtcccttggccatggtcacagaggtcagaagtcagggctaggccagtctgtttccaccacatgaacaggcagataggttcaagggtgcttggcagtattgtggggaatgtagattcgagtccaggggacctgagttcaaaggtgggctgtgccactcaccgggaaatgggacgtagatgcttcagggctgtttcaagcctggtgctgggcaccctgcaggctctctgggcctattattttttaaagatgacagagcccaagagacccacattcgggtcccagctctgccacttactagctgtgtgacctcagacaagcatttcatctcactgtgcctcagtttctccatctgtaaaatagagatgataacagcatctactttgttagggctggtacaaaattccacccagagggtatttggaaacgcagtgtgaaccctggtgtgctgaacaggggaacggactcttagggtcattatcacacttagtgctttggagaataggtgtctttttgctatttcttgtggcctggcctgccctgccctgtaaagcctgggggaattaaccctcgtctatttcaccagagatctgtaatctcattaggagcagtcaggcagcaggcagcagggaatgggaagtgcagtctgcagtgagggtgggaggtaaagggtggggtgcacacaggggcttcctcctcctgacataggagacaggggcagaggatgaagaggacgggccaagtggggcataggggagaggtggggagaggggactggggcacaggctctgaagccatggacagagctcctgactgagaagattctgatcccaatttaatcagctctgtgaccttgccgtctctgggtatcagtcttgtcctttttagaatgagagaaatgggcccaggtacctttgtcaaaggaacttcatttcaacaaaccaatcttccaaagcccctgctctttgcagtagcttggggtggggggtg

SEQ ID NO: 552 - DNA, 28525 bp, Homo sapiens
  source 1..28525: mol_type = genomic DNA
tccagctctcggccccagggaagctcccaggccttcactcgcttacctgcctctctctccagacccagctcctttatttttccctccctttccctggtcagaaccctgggcacctcctcctcatgctggggtccagccttggcccttggcccctctcctctctagccccatccactcctggtcatctcatccagggtgggagctctaaacaggacatgagtgtcaatgacaccctcacgtccagctcagaccacatgccgcaaactgcacactgcacactctgccctctctgctggcccacaggcccctcccgtggatggacctgcagggttgcctcccctcatgtcgcccccagccgcacctgaaggccccctcagttggccctctcagcccaggccccaaccagcaggaagcctgtcaggcctccttccagggaggttccaaacctgcccctcaaatccccccatgccccatccaagtccacaccacctctcatctggaccacagcagagacctcctgcactgcccctcccctcaacccctcatcagcacatcagccagaggctccttggagaacagaaggggctcagaaccctgcagcggcgtccactgcacacacaggaagaactcaagtgctcataggcagtgagtcatttccttaggcattgtggtgacccgggatcatgtgcctccccgaagcctgcacatgcactctaatgatgcaagctaccaccaggcggtcagctttgccagctgacgtcccaaacagctggcatggggcatgcacacagtaggtgcttaataaatgtgtgtcgggttaagataggcccaaagccatttcaaatgtccaggcagtggtgtaggcaggggtcagctctgaagctggcctcctctcattcgggagacccctcagaggtcccagcctccaggatgcagtgttcagagcaatacttctcagtgcacgtctggctgtgtccctgcccagcgctcccagggtcacccctctctctagactcactttctgccccgtcaccccactgtacacccttggtcccagccccttccagtggctcagcttcctgaacactccaagcctgggctcacctctaagccgttatctatgctattctctcagccaggatgcccttcccatacccaaacaatccgtgctcacctttaagactggctgaggcatcacctcctctgagaagccacctctcccaaacctgagcccagatgagccaaagcccttccttcctccagtcagcctggatcctctcatccggcagaactgtcgccttgcttctctgaagcggtgaatgccctggggctggggacgcacaggctcgctggcccacaaccaaagccgcttcctctggaggaggaagtccaggggtgccagggttccacttgctttcttcttcacccagcctaaagggcaattttcccacattccctcagaaccaggaagttcccccattcacactgagcctgttcatgacaaaaaaaaaggtctctccgatttcctctgctcaaccagttccctggctacctgaggccctgcttcacctggaggaagacagtggtaagtttccagcatctccaccacacctcagcgccagaggaccctcagcctccctcgcacacctctgggcagtttggtaactcatcccatctcctcctgccgcttcatcctctaagccctccccagggaacccaggaggcgtctggaacctgttggggacagtccctcacacctgccccattgagtaagggttcatgtggatgcccatcctcccccaggagtcccaaatctaagacactctgagactcctgtcacccacccccaccttacacagccggcctttctgtgcagtccttccaggaaactctggctggacctgggctctcggcttgactgcactctccccaagtccccagggcggccagtggtgactattcttgaaaacgagcttggcagaggatctggggacacgcactccagatgcaaacacgtttgcactctttgggctggaatcccctcgagcggtacactgcacccgtgggcttgctaagaaaccacctcacagagggcagattgattggacaaaaggcatttggtccccaaattgattgacgtgtgtgaatgggagttttcagaacaaagacccaaagatatgggggaaacaggctgggcgcggtggctcacgcctgtaatcccagcactttgggaggccgagggggggcggatcacgaggtcaggagatcgagaccatcctggctaacacggtgaaactccgtctctactaaaaatacaaaaaaattagcgggggctgtggcgggcgcctgtagtcccagctactcgggaggctgaggcaggagaatggcgtgaacccgggaggcggagcttgcagcgagccgagatcgcgccactgcacttcagcctgggtgacagagcaagactccgtctcaaaaaaaaaaaaaaaaaaaaaaaaagatatgggggaaattgccatttctgatgcttaggctcaacaaagtatggacatccatgcgggaacacagatgaaccaagggacctgcactaatgctcctggaccgcaaggggaagcgcagcgagggctgttggtctagatttcttgaactttctgagcagcattccttccttctgggcatggagcaggaccctcctggaatggggtcttatgccctacagtcaaacaagagaggtcagataatttatggccagcttctaaacacaaaggtggagggaaagttagagcaatatttttaggtttgatgtctggctgtgtggaaaggcggggttctgatttctatgacctgccctggggaaaatggattccagtttctaaggccagcttcggggaaaatggcactgagagacaggagagcaagagaaggtcagagaaacactttttcttccgaagctgcttctgaggccttcattttggggtattgttttctgatgcccaacatatctgagctgctgaacgaagggtagctgctgaaccactcccacggtgacttggaatggcttagccagccggccttgggccacctggctctggcccccctgcccaccaggactttggccggctctcgctcgcctctgcgatgtccgtcccaccctgtctcacccctgcagttttctgctctgtggagcgatgattgacacatggcagggggacactggttttgacatttgagcctgtgcccagcccttgcctggggaggaggtggggcaggagtcctgaatgagcatctccctacttagtgacagtcaggggcacggagaatggtgcccaggccaagggcagggcttgggccaagtgtgcgcagcgtggggtgtgtgtgctccagcggctcctgctgcggagggcggcatgaggcttgtttacctgtgtgctggcatctctggtggcccctgcaagggtggggaagtggcaggcagggtgaaatggggaaaagtgggctctcaactgctcctagcagcctccgggtctggggagggaagtgaggaggggcccagagctgtctcctggtcactcttctggggctctgtgcagacctttggcagggccaggctacaccacaccctctacaacctcccctgacttcttcccctaacccctcaccaccattcctccgcttttctctccccgcccctgcctcccctccattctctccttccctccacctcccggtcccatcccctgcccacactgcccctcctcaggcccaaagtggacaccggtgctgcctgagggtcagagtgtccacctccagcagcccgggcaccgggcaggattcaagctggagggggctggggcgggcgaagccgggcacggggcgagcccgctggtgggcggggcaggggcgggtccttcgaggggaggggcgggctcggccagtgagagcgcagaaaccgtggcacgggcgctcccggaactggcgattgcaaagcgcgagggctggaactcagacccagaggggcggtccctgttgcaagtcatctcccgaaagggcggggccggggctcatcccggaaggaccggtgtctaggtcaccctggagcgctcaccccaccggcacccgtgcccaagcccgcccctgcaaaggcaggtactcgagcacactccggagagggcggcctctgagccccgaaccccgaactccggcgcagcgtcgcacctctgcccaatgaggtgcccctgacgtgcctgctgcggctgccctgctccccccagcctccctgcatcccgggatgggggagggcgccaggcgcagctcccggaccctcaggggtctccccgccctaccccaccagcctgggttcggtacctcggggctcagatgtgcagtcagctgttaatgtggcaaaatttggggaagtcctctgcagccgcaaaatccagttcccaccagttggaggccgggcggggaagggtggggacagacagcactccgctgtgggaggtaaggcagagctactggggagcctggaaggctgagctatgtctcccctacgcaagaccattccagaagccccttggagctctggctgctggccacaggggaaggtagaccttccctgagagctgcactgtgttggggacagggccactgtgggcctacggagggcctccaggcacagggacccacatcagccctctggccacagaaggcgctgatgatttgaggtggactcagccaccactccgagcctctgcctccctctaaaagtggggcatggcacattcctgtgtcaggcaaccaggcactgagcctggcccacctgcaggggtcggggggagcagcttgtccctgtctcccctccccgggaggctgtgtgcctggagaccagagctgtcaaaagtggaggagggggaccccctgatgtgtcctctaaggtccaggtagcaggagagctccactggggagggggtcctgcagtgctgtcctctcttgcaggcaaggccaggcgggtgctgcctgggacccagtgactcagcacccctgcccggatcaactggacttttgccccctgctccgccagcctcctgcttggatctctcctgggtctccctgctgcgcctgtccaggatgcagggagctcgggctcccagggaccagggccggtcccccggcaggatgagcgctctaggccggtcctcggtcatcttgcttacctacgtgctggccgccacagaacttacctgcctcttcatgcagttctccatcgtgccagtgagtaacacaccccagcccctgcagccccagccagggctgaaccgctgttcctcctgccctccatctgggccgtcgcagagagtgggggtgggggtttcatgctgccagggcccctcccagttgggactcatgccacgcttaagctgagtaagttaaggactctgcctctggacccccgtcagcacatcctgtgctccagcttcagtgccagccccgggagaagccatggggagccaccccacttccctcctgggggcagcacctcctcaaaccttcctagcgctgttcctcctgcctctcacccggcagcctttgccctctggagtccctgccccaagggctgttcaatccggtgtggctctgggcggatcacccctcagagaggctctccttgcacctgcccgcagcttctatctctcccctccatcttcttgggtccttgttgtccactaaatgatctgtggcggcaaattgatctcaagctttttcttgcaagagatagaatgctgtcttattttattatctctgttgccaaatgcggaaacatttcattggcaaattcatgttagtttagtgtatcattcagtagtctataccacagtgtgtggctctggaagctgtaatagtaatgattaaattatattcaccaagtctggagaggcttgggaacaaagtctcacatcaccaagaagctcaggcagagtcagggccaacctcggcccttcctgtgtttgcttctgggaagcccggcgtgcgtgggctcagacagctgccctcctcctctcagccctcagagcctggacctgggcatctaggcgggagtggggatgggcctttggcaccattccgggcctggcagaggctcccagcccgagggtgagcctaaggatccctccccgccgtgcctcaggcgccccgcccactcctgctaaatggctggggccaagccctgaatctcctccctacccgtggggaaggctgggcaggagccttgcttttctcatcataaaatgggtaataacagtccctccctgtaggattggtgcggggaagagtgaatgagaagtcagaacccttcccacagctgggcacagagcacaggtggagtggcttcagccacccatcgactctcatggggagtaactccgtgctgagtgcccaggagctgaccctgatgtcagaacctgaaatattgcagagtgtaaaaatcctcaacagcccactccctcggagctgggggtccacacgcacaggggctgcagtgggaagggggcgaggtcttcctcatagagaaggcaaccttggagcagggctggaaggaagcaggagaggccccggggcagtggagagagcagagtggctagagtggaccggttgaggccagaatgggaccacaccccacctgctgctcaaagaactccgggctggtgatggctgtggaggaggtgagaggtggctggattttgcatgtgttgtcaatggactgtagtgggtgtgagagaaagcagggctcagggagcactgaagatctgggcctgagcccataaggaaggaggcatggacaggaggagagggaaagatgggagcccagttggggacgggttgagtttgagacgattttcgaccccagtggagagccgaagggagctggacacaaggcagttcagcacagaggctctggggccctgcagcatggagacggtcatgggctgggctcccccagagggcagggaggctggaggtcggatgagctgggggaactggcagtggtgatggaggaggggcaaaggacccagcacagcccagagcagcagaccatcgtggaggagggaagaagccacgaaggcaactgtcactccagtgggaggcctgccaaagcggaccactggaggcagcagtgtggggtcaatggggacctcagggagaggggagacagcaggaggttttttgtccttgcaatagtttgctcagaatgaaggtttccagcttcatccatgtacaaagcacatgaactcatccttttttatggctgcatagtattccatggtttatatgtgccacattttcttaatccagtctgtcattgatggacatttgggttggttccaagtctttgctattgtaaacagtgccgcgataaaaatacgtgtgcatgtgtctttatagtatagtcccctggggcctgctccgagggctgggagagaaggaaagagatggaaagagaggaggctgcaaggtgaggcagctgctcagagctccgccctcaaatatgtgggagtagctgtaggggagggtcaagagaacgcaagagaagtaacaggatgtgagcatgctccattgccaccccctcaaaaggggattgtgcagagaaacggggagagaggagcactgggagcttggtccagtgggtgcccccacagaaggggactgtgcagagaaacggagagaggaacattgggagccctgcccttgaggaggcaaaaggttgggatgtgacgcaggcagggaggatgacttgggtaggcgaggacaggtgggcaggcttggggatgagaaactcagcatcctctatgaacagacacttctcaaaagaagacctttatgcagccaacagacacatgagaaaatgctcatcatcactggtcatcagagaaatgcaagtcaaaaccacaatgagataccatctcacaccagttagaatggcgatcatgaaaaagtcaggaaacaacagatgctggagaggacgtggagaaataggaacacttttacactgttggtgggactgtaaactagttcaaccattgtggaagacatgtggcgattcttcaaggatctagaactagaaataccatttgacccagcgatcccattactgggtatatacccaaaggattataaatcatgctactataaagacacatgcacacgtatgtttatcgcggcactacctacaatagcaaagacttggaaccaacccaaatgtccatcagtgatagactggattaagaaaatgtggcacatataaaccatggaatactatgcagccataaaaaaggatgagttcatgtcctttgtacatggatgaagctggaaaccatcattctgagcaaactatcgcaaggacagaaaaccagacaccacatgttctcactcataggtgggaattgaacaatgagaacacctggacacagggcggggaatatcacacactggggcctgtcgtggggtggggggaggggagagggatagcattaagagaaatacctaatgtaaacgacgagttaatgggtgcagcaaaccaacatggcacatgtatacatatgtaacaaacctgcacgttgtgtacatgtaccctagaacttaaagtataataaaaaaacaaaaagagagaaaagaaaaaaaaaaagagaagctcagcatcctcacactagcggcgctggggaggggagggatggaggaggcagaggtttactaggggaatgtggggtgattgtcaggtcaagctcacaaacaaaggagagatctggcagacagagggctttcccatcctcgagggagcagggatggagctgaaggaagaaggagtctggggttggggatgggggggttaccgactgcccttgggactgaagtgctctggggagaattcgtgtggaccaagggggacagtggaaagaaggggagtgggaccccaagactgagcttagggaaaggtccaggggagggggcgggggcggtgtattagcatctggggctgccataacaaagtatccaaaaccctgggggcttagagcaacagaagcctattgtctcacagtttgggaggccagaagtctgagatcaaggctccctctgaaacccacgggggaggatccttcccacctcttccagcccctgggagcccagacatcccttggcttgtggccacatcactctgtcttcccatggatttttacaacgtcatccatccgagtgtgtctgtgtcccaaattctcctcctaatgaggacacgggtcacattagatcagggccctccctcatgtcctcactgtaacctgattaaccccatttcctaagaatgtcacattctgaggttctggaggttaagacatatgaatttggggggtacacaatgaagcccataataagttacatcactggaaggagagtcgggaactcagaggcaggggcagggggaggagcggctgcagggggaccaaatcacagagaattagggcaggatataagggtgtccctgggagggatgctgtcatggacctactcctccggaggggctgaagggctggggcctcacagagcagactgtgtcctgctgggcaatgggccacctcttggaggtcacttgggggccttgggacaatctgttgctggccaggacactgctgctggcgtcccccacaaagttttgaatgaatgaagacaaaatggtgggggtcaggtgcctctctggggcgtgcccccagaggggaaggaccctagaggccaccctgggctcccgcctaggagaggagttgcaaggaccttagagaccacaacaggcttccgcctaggagaagaggagcagggtccccctgggaagggcccctcgatggtcatactgtgcagtcaacagaacccaggccctcggtcccctcccaccccctgcccatccagggaccccagattctaggccctgcagtctttcccagcccctcccccgggctccctcctgtgtttcagtacctgtctcggaaactgggcctggattccattgccttcggctacctgcaaaccaccttcggggtgctgcagctgctgggcgggccggtatttggcaggtacagtgtgtgtgtgtacaggggctctccccacagtgacccaggccccctctcagacgccatgggctcagacgggccaggttccctgaccccacaccggacccccctgggatgacggcactcctgtgtcacaggccgatgggggtgcagaagaactttggcccctggtaggctcccgggtgtcccacccacgccttccactactcctgcctgtggccagagagagagtgtgactggtgaacacctcgtggctgtaagcaccagcccgtaggcctgccgagaccaggcaggagggactttgggggctccatacaccccgggtctcagtgctgtgggaacactgagcttgagagaggacagggacatcctcccacaagccacagcagacaggggagcaagggacacgtattgggagttgcctcttcagagcaacccgtaggcagaaatgaagggttccgcaggcagcagaccagcagcgatctctgggagggtttccagtggcccagaacagaagggagaaaggcgctgctttctcagacccaacctgacaaacgccttctgtaaaacgcgggcccaccctttggtcccctgggattccaccatttatttttacacggagttggtctttgccctgggtcagactcccagctcagtgaagctgtctgcgcacagccccactgggacgctggggaaactgaggccctgagaggagggaggcctcccagcagccgcccaggcgcccccgccctccatccccatcccgcactccagcctccctggtcagccccgcctgggcagcccctggacggggggaaggggacactgaccgcctccgtgagggtccgacccgcccctcggcccccaggttcgcagaccagcgcggggcgcgggcggcgctcacgctctccttcctggctgccttggcgctctacctgctcctggcggccgcctccagcccggccctgcccggggtctacctgctcttcgcctcgcgcctgcccggagcgctcatgcacacgctgccaggtagggccggggggactggagtccaggtggggccgggtcgggggcagcctgcggaggacccgggacacctccagggaggtctgcgtgcgcgcggggtctggccctaagggctggacgggggtggggggcgacgtggggcgtggcttgtggaggggcgggtcagggggggaagggccccaccgaggggctttcgccgctcagctcccccgccccgtccccagccgcccagatggtcatcacggacctgtcggcacccgaggagcggcccgcggccctgggccggctgggcctctgcttcggcgtcggagtcatcctcggctccctgctgggcgggaccctggtctccgcgtacgggtgagtggtgggggccggggcggagtctgtgggtcaggacgcccgcggctgggtcggccccgccccgcctcctcttggcctcggtttcctcttttgctcgtggggcgcgagtggccacgtgatgtggctactggggacgtctggccccgcgcgaggcctaggcctgacctcccgggctggctggccctggatagggccaggtgatgtcccagtgctgtccggggcgcgactggactgccaagctgtccacgcacagccccactgggacgctggggaaactgaggccctgagaggagggaggcctcccagcagcctcctgctggggacaggagcaccctgggactgggatgctgtggcagcggggctgagctgttggacggtgcccagagcacacctccctctccggaggtctctagggctgtgctgccggccttgtttgagtccccgaacgttctcccagcattttcactggagcctgggctggggactgatggctgctgatggctgtgagcaggaggtggagtggggtggggtgggtagtttgaacacctcaacattgcccccaggactctggttctagaatacagcggcagacaacacaggctgagtccctgggatgaagggaatgtgataggaattcccgtaacatcaggctgagctacatggagcaaaaagtcacaaagtagaactgggggctcgatggatgggatcactagggcctgtctgaggaggcggcatctgagtcgaggcctgaagcaggagagggaggcaaagaaaccacggtgcagaggccctgggtgtggaagccagggggccgtgtggctggagggaggaagaaggggcaggcaccaggccggggtgccctgggtggcacagcaggggtgagaatggggggtgagctcccctgcagggagaccggtaggacagccattgtgccggccgaggtgggggaggacagtggctggaccagaggggaccgtgatgagagaaagcagagggtagattctggctgggttttgccagtgggtgggatgtgggtgggaactcaagatggcagtgccaaggccgtgcctgaccctggggagcctggcgccttgcgcagaggcccaagcagcctggggtgccactgggatttgggtcttgttcaggcccagcctgggtgcctgtcaggcactccagggagctactgagtaggcacccagataagggggagaaatggggtgcatcttcaagtgtggatggctcggagccctgcgccccccagcacttcatgtttcggggctgggaggtgaggagggagcacgtcctgggagccaagggccactggatttgtgggggtcagggacccgtgcctctaccgctggtggccaaggaagccacagtggcccaccatctgcagcagggaggccaccccagtgctggaccagcaccaccccctcaagtcagtgccagccgcagaagcctcatgcaatagacggatcaagggaaatggggagaaaagagagggggtcgggaagtcgtgctataaatgggggcagaggtgggtccaggaggctatgctcagggtgggaggagccatggggaggcgccccagggagagggaagggctgatgtgggagccaagcacactgctgggagggtgtccctggaggatggggcttagggcacttgtgtgggcagctctggtgggacagcagggacggctcaccctggggccagggggctggcaggtgtgaggtgtggggagccggcaccacccagggcctgtctctccagggtggccagggtgaggaagggcgtgaggagggcacggggaggagcactgggccccagcaggtggctgagctgggcggctgccatcccagggtgctgcccacccccaggtactctgccggctcagggcccagccgcctgctgccgcctccttccctggccagccttcctcacctatgaaatgggccctcccctgcccttactcacccacaacgatgctgggagggtccgagctcgctcaggcagtaagccgtggccatggtgctggagcagctcagcacacatgcctcctgcaggcccgtctacgaggccacaggtcccctcctgtcctcacctgccctttcccccatcacagctgctgacccagaagacaccactcatgtccctctccctcccagtagctgccaagacggcctctacctctgcccacacctgccagaacattccattcgcttccctgcctccattcatcccaagatctgaggcgctttacaatcttgacgtttcataatcagaccagctgtgacatttcctttgatgggaggggtaaccgaggcccaggagatgatgaggctccctccatggagctccccagtccccgtccaaggcccaggcagtgtgggactccctcaggttcctcataccacacccaagacacggggtgctgcttgggcactgtggcaaaagctggctgcccagagtggtggtggcacaggagggctgcggggttgaccttgtggctggtaatctgcctttgtccaacccagacagggtgagggaggcccacacctccccctcgggggctcaccgaaggcagtggggccaggtgccagccaggctccaaagcctggtgccccatggcaagggccagccccctggccctcttggtccagctgccccaacgcctgcagcctgttctggctcctggcctggtgcggggcaggagtctggtgcagctgtgaacatcccccgccttgcagccttcctgcccttccttgatggaaaccgaggcacaacatgtgtgggctttccctccctgcccacccacctgtgtatcccattcctctggaaggccccagtcctgcctcatccgcacccacctgggcagcaggtgggaggaggaagtggacttggcacccacaggctgcgggggcgggcactggtataactggtttgggcccagcctccagagcccagggctgagaggccaggctggcctgaggagggacccgggacctgagtcactgcacacacgctgggtggggggtggctctgtgactcatgttctgagcccagcccctcacagactggggagggatggggaggggccatagagtcctatcctgagccagacagcagggagccctgcagggtttgccttccccaggtggacaggcagccaccagggccatgccggtgccatgggggtgccagggccctgtgggcaggacacccctgcccagccaagaaaaaacaaggagccaggggcactggagctcagagagggaggaggggatgggaggggaggtgagcagtgtcccatacgacccagggcaccccaagcgctgagcggaggctgaggagtgcaggggtgtttgtaacagggcacctgctgtacagggaagaggctctcgggggcagatagatgcagggcaggggctggcaggcagctgagggagcagcaggatatgggcgacccaggcccgccgcccccccagccaggtgactcagctactgccttagttcgtgtacctcgcagtgcccaggacactccggttctttctgttcttcccacagtgggcaggcagcaggccccgctgagatggttctggccccgctgtccctcaggacagccctgttgagcagcaggctggacaggcctcctgctgggcccgtgagtcactccagtctcagagcccatttggggcaggagggagcttgtggtttggttggagggctatgtgtttggggaatggggggaccaggtacgaggagacacgaggactgggaagggtcaggccagaggggcctttaggaccttctggggcacgctggaagccagacggcagctgcgttaggagtggcatggcaagatgttcattttcaaacatggttctaactgcagcatcctggagcacggatgacttctctcagccctgggctggacatccagggacgctctggacagccccctgccccatcgtcttgtgagctaggtgtcccacaaagccaggtcccagctgacctagcctcagccccacctgtgggttcgctcctggcagcaggatgacctgggcacatgctgtcaccttgtgcgtcccctttcagagcctcagagtaaggtgaggcttgatgagggcttgtcaccgtagaacacacagaagcccagacttcagcagaggttcctggagacgcgattgaaagccaactccacgccctgctatctgggcagcctcaggtgtgggctgcggttggtgggcaggatgcaggtgggctgcgccctgcaggtccagaggggccccagaacagtggagttaggggcagccggcagctgtgaacccagccctcatttgcatataaggaaatgaggtcacctagcaggtaagcggcagagaagggacagaggctgtgggtcccctgagtcctgtccagtgtcctttcaacagcatccagacagacactcctgtaatccattcaactgaaagagcaggaggagacaaagacaaattaacctgtccccaccttcctggtcgtggctccactgataaaagtgttggatgagccccgggaagccagcgtgcccctgcgtctggcaggtcgtggtgaggttgaggggggctgagcaggaggggctgacggcaccgtgctaagggtgcttccagtcaatggtcccgggggatgcccaggctgtccggcgtgcagaggccccagggctggggccagcgtgctggatttccttcccactcccgtttccctcctggcagttcatttttggggagcaggagagctgtgactggggaaggacagcctgcgtctcccccagcagccacccacggcccctggcacagtggtgggacctgactccctacctcctggggccctccagggtcccccagccccaggctttcctgttgcccacagcagcacaggcctttggtttacccaccaccgctcgagggcctggcttcctgccaccatgccttgcttgtcaccagcctcctaaaatagccatcgaagtggtgcgtctgctcctgtgtacttctgggacatctggcaaataaggcaggttttgcccctgcccagccagaccctgagctgtgacacgcaggcctctgaggccagggtcccaaagaaagggcccgtctctctggggctggccacaggggccagttgtccctcctgcgccatacatctgtgcctgctggctggagggacaagctgtggcgcccgagcccagccgttccccttccctggcattttcccaaaggaagggcccattcgtgcggaaccccagcagccagaaaacctgagtagctgacgtcctgggcggtgggtgctgcaggagtcggagctgccctgatggattggcgggggcagcagcacaggtggggtggatatgccagcacccccctagactgatgtgagcttaggggtcccacctcagaaatgaggggtggccaatgcccagactctctggactcagaggtggccccactgactgtcctagtcagtgtggctccaagtcccctccttgctctggcaaacggatgcaggtaagtgtgtgtacaagtttgcccgtgtgtgtgtgtgtgtgcgcatgtggctgcggtgaagaggggcgaggaaagtcctttctttgaactccttggtggggacatggtggcctgtggctggccttgtttttgggtgcaagggcatcttccaggaccctgacccctactgggtgcctgtgccctgaggccctggccagggcagatttggaggatctgttgaggttggggcagaacttgtgctgcgtgtgtgaatggctcacacatttgtccgatcatctaatgatcactgcggtctccgcgcagggtccaaccctggaccacctgccctcaggggccagattctagccagctggtaaagcgagtccttctcagatggcatgctgtctgggaaggagggctggggcctcaccaagaagggcccttgcaggctgtataggagtttgctcagctgctgagaggaaggccgtggcggtccggcacaggcctggaggccttacagacgagctcagtaggaagccccaacttcctcctgtctctccctgaggggagggggctggctgagcccccaggaggcaatggtgacagttggaacagccagcttcaggtgcctccgtccccaggagacaagacctgccgattccttccaggggaatcacaggccaagtttccaggtggggactcatggcagggaagctgacggtacagccagagtcccaggccttggtagtggcccaggaaggtgggaaggtggcaaagcagcctgaggggcacctccggggctttgcaaggctctgggatcccagcccaaagccccctccaagcccagcatgccccacactctagaaagtggggaggggccaacaggaggggggtcggtttctgagggcctgctgaatgccaggcccacccttgcccacgctggggaggcagcatagccatccccatgacacagcacaggtgcccaggtctcggagagcccctcccagggacatgcacaccaggcttgccctttggagcctctcctgaccttggccagcgtgggagctgctgttcctgggaggatccgccacctgccccaggcgctcaccagcctggcttccacagctgctacccacaggggctgccggggcctgcatggcgtggcgagggtcagggatggtgagcgccccacccattccttcatccatcacctaataaatgtgctctgagggtcccagtccccactctttaggccacagactgtggggatgtgggaggtcagatttaagctattttagtgcaaccaaaggtgcaggttgggggatgtggctggggcgcctgggccctgggacccgcaccctgtgcagccgaggctgttgcccgcaggattcagtgcccggccatcctggctgccctggccaccctcctgggagctgtcctcagcttcacctgcatccccgccagcaccaaaggggccaaaactgacgcccaggctccactgccaggtaagccccgccaggtacaccctgcccagatgctggggcaatggaaggcattggctaggcctgcgtgctccagccaaggggtacggggggcctgaggggaaatctgggggctactcacaccctcctgccttccttgaacccttcccagctgctgacatcatagaagccaagtgaggtgtggtcatgaagaggtggaagtggggctccggcaggcagggaggcccagagaggcaggaaggcccagacagggaaggcgttaggaggggaggcccagacagggaaggtgctaggaggggaggcccagagaggcctggggaggaccaggagggacccccccaatggggtgggtgggccagcaaggctccggaagctctgagtgtccagggagaggcgagggtgctgcccgaggggcactcattggtggagggcagaggatggtcaggctggtcccatgaggagaggccaaggctcctcagagggggtcccctcaaggctggccccctgctgaacgcagcccctttgtgccaggcacgtggcagggcccatgcctcggtgcctagggactaagagcccagcctgggccagagggacccacctgggaccatcctggggcaggaggctgtcatggaattaacctagaaagtccagggggagggccgggtggagatgggcctgtggcgagcacagcagagccagagaggcaggagcccctgagacaataaggaggaaggactcggtgagccgggctgggggcctgtggcttcgcactcagaggtgcccggtgggccaggccacggcggtgacttgtggccacagagagtggtacagtattgccattgtcttcctctgggctggtggcctggtcatgctctgccccaggccccaggccaggaccatataggaagcagctattggtcccttgttcagggactgccgcaggcctccgccactgcatgcccaggttgaggccagtctacctgcgtgcagagaatgcttttcctaagtgcctctggggattcagggggcccctaggaatgcgtagaagtgtgctgaggggcggtgcccaacctggcagctgggagcatcaccagctcccattcccacaagtgagcggtgctgaagccaaggaaggaagctttaccctggcgggcgcaacagggccctccgaatggcgaggcctgcagccgggcgaggggtgggcattgggacaatggcctttgcaggcctgaatggcctctccgtgccaggcggcccccgggccagtgtgttcgacctgaaggccatcgcctccctgctgcggctgccagacgtcccgaggatcttcctggtgaaggtggcctccaactgccccacaggtgagtcccaactactgccccaacagcggccagagcctggcagagtcccagctgcggccagggcccggcccttcctctggcctgtgccccacaggtccacacagatgtggtagagcaggcaggagcgggaggaaggcagaaaagtgtctttcccacctccttccagcccctctacactgcacacctgcagatcccagggtgggcccccacgggcagagggcctggctcgcagccatgcatccctgtgtgctcctcagctcttaccctcataccctgtggccccacgtcctctccagacagcctgagatgcagggacagcaggtctgagtgtcaccactgccttctgcagcatgctggccctgggccctctcagcagaccgtagggcgtcacggaccacagataggatagcgagccacggacaagcccacgagcagccctgtccctcagaagccccgcctggactcctctaactgagaagccaggaagcaggatggagaataggccctcagcactccaactggcaccggcccctgtcccacccagcccacctaggccagctctgttggttctcaaaactggaacccaagttactaacctcagtaacaggccctttgagggcccttttttttttgagaccactgaccaggctggagtgcagtggtatgatctcagctcactgtaggccccacctcccaggctcaagcaatcctcctgtctcagcctcccgagcagctgggactacaggcatgggccaccacgctcagctaatttaagtgtttgtagagacagggtctcactatcttttccaggctggtctcaaactcctggcctcaatcagtcctccctcttcggcctcccaaagtgctgggattgcagacgtgactttgagggctcttataacagagagccgtggtgggtcttgggggccaaatcctcccacgtggtcagccctgggtccctcccttccagcaccttcctgctcacagtccagagcttagcaaccacacgagaggcactttccacaccagggatacggcagaatcccagggaagggtctcattggcccggctggcatcacaggcccctccctgaaccagtcaccagccagggcccagacaccctgattggccaggctgctgaggcgggagggaggtgggcgccaaggtcggggtgtgggggtactcacccctgttcccctgccccggctcagggctcttcatggtcatgttctccatcatctccatggacttcttccagctggaggccgcccaagctggctacctcatgtccttcttcgggctcctccagatggtgagtgggcacacagggcctgctggggggcacggcaggggtctccagtggggcaggcctctgagagtagaggctcctccccggcggaggctggggagcccttggcctcccatctggcacatgtcagggtccacagggaaccaggcatacaggccagggagggagagccaactgcagtggtgggcacgctgtgaggacagtggactccggcctctgatgggcagctggctgggatctgtggcagcccacctgcccaccagctgtgtgaccagagcaagtctcccaaactctccaaatctgtcccatgaggccaaagtgcccgccttgcagggtccttggcagatgagatgacctaacgtggcaaagtggttagaccagcgtgggcccctttggaggtcccataggagcaagacgccagccctcagaggccacgctgtcatggtaggataagacgccagccctcagaggccacactgtcatggaaggatgccctgaaaccctggcagctccgatgcggcaggtgtctgtctgccagccccccagaaccgctcagctcccgggccggggcgagacacctccaccaccagctcctctgggcttctggaccagaccctgggtggtggggacaggtgatgatttgccaccacccaggatggctgcctgacagccagagtgcggggcgggggggctattctgggacccgccagggtgggggtgggggctctcggcctctccggaagcctgtggcattcctggcacctccaagccatctgctcttcagcctctgggcccaggactagactagtgctaaaatagctgctcctgggaggggctggacccccaccgtgggcagagagggcctctgctttttggggcaggaggggccaccctggcagggtaaaaagagataaacagaaaaacaacagcaacaataatagtaacaatccggggttgttgccatggggcctgttctgaacaggctgcgcccagctcactgcgaggaaggacgcttagccaggccctggctgaagcctgcagctgggctggacacagcagtcattggcctgtgttgtgggggacttgggcctgccatggctgcagtggggaccctgcctgagacagacagagctggggtggtgaccaacaccgtcggggcaccctcgcaggaactgggcctggtgaactgcccagggacggggaaggagcagggtgaggcatggggaccccgacacaggttgagcagcgggagaggaggctgaggaggggaaggagggggcccgcagagtagcccccagaccccaagtccggtcagggacaagcttgttagctccaggttcatgtcacaacctgcagggctcctaagttcaagcttttttaaacttaatgggcaaactgagacgcaacacaaataggcttctgaccttggtgtctgagtcctggatctgaagtccttcacggcactcactgtgagcccctcttagacgcactgcacgaagtgagcttgccagctcttcctttaagaaacgtgttaggccgggcgcggtggctcacgcctgtaatcccagcactttgggagaccgaggcgggcggatcccaaggtcaggagattgagaccatcctggcgaacatggtgaaaccccgtctctaccaaaaatacaaaaaaaaaaaaaaaaattagccgggcctggtggcaggcacctgtagtcccagctactcgggaggctgacgcaggagaatggcgtgaacccgggaggcggagcttgcagtgagccgagatcgcgccactgcagtccacgctgggcgacagagcgagacgccatctcaaaaaaaaaaaaaaaaaaggtgttaaaatcccaaaaaaccctaagataaagcaagtgtgaaagtaagatttttaaaccatttatggttccggttggaagcagtttctgttctgcctggcaggaatttgggagggtgactggtcccctgcagaggtgctgcaggctgggcctgccctgtgggcagatactgagcccaggggctcctccagccggggccacccctgcactcccaggcgcgttggcccagcacgccctgcttagtggaggagctgagatgaccagatagagagcctcgccctggcctgggagcagcctgcggccaagcctgtcccaccgagcccatccccgggagcagcctgcggccgagcctgtcccaccgagcccatccccgggagcagcctgcggccgagcctgtcccaccgagcccatccccgggagcagcctgcggccgagcctgtcccaccgagcccatccccgggagcagcctgcggccgagcctgtcccaccgagcccatccccgggagcagcctgcggccgagcctgtcccaccgagcccatccccgggagcagcctgcggccgagcctgtcccaccgagcccatccccggtgtccctggtgtgggcctttccttcctcccttgtggagaggagccccgactcctcagggatctcagacccatcctgacgcagtcactgctggcggagtagggagagaccccggggcttgcagatgctgaggggccttctctgcagaggggccctggccaccacaggccagtctggaggtccccagctttgggggctggccacagtccagacgcccctccctcgcctcccccatacccacttctaccctctctgtctggctctaggtgacccagggcctggtcatcgggcagctgagcagccacttctcggaggaggtgctgctccgggccagcgtgctggtcttcatcgtggtgggcctggccatggtgagggctccccgctttgggcccactcacctgaccctctcactgggcaaggccacctgggcggtaccatctgtgcttaagcccttggggactcctccagccccccacacccacccggggccagctcttcagcagggacagcagtcagggtggggagggacaggtaagaccccagagaggagcctggtcccgtgaggcccccactcagctcggcccccgcctgccgtcccaggcctggatgtccagcgtcttccacttctgcctcctggtgcccggcctggtgttcagcctctgcaccctcaacgtggtcaccgacagcatgctgatcaaggctgtctccacctcggacacaggtgagtgtggccagcgagtggagcagcctcctccaggaagccctaggagctacccggtggggatggggtgggcagcctagggtctgtgtggggtgggtagggtggggggcctggggtctgtgtgggttgagtggagtgggtggggtgggggcttggggtctgtgtgggatgagtaaggtggggagcctgggtcttgcatgagactcctgccctaccacctagcccagctgggggcaggccaggggcctgggagggggctgcccgcaggtggcagttggcttggccctgagaagcacctgaggactttgcctgccaggcctggaggccccggggacttctgggccctcccccagcacggggagtggggcacacaagtgctcaggagcttcctgaatgaatgagggagtgaatgaatgcataccagtaattaaatccaggaatcccctaggccactgcaggggacacaggtcccctagacatagattcccccagtccccacttccgacccagctttctttcttgaggccgaagagagccgctcatgcagactgggggtgtcctgggcccgatgttatccaggctcctgccccaccccaggcacagtgtgggtacacactggccagtgcagggggctcctgtgggctggttgaggtcaaaggactcaggagtcctttggagtactggagattcttccaggcctccccagcagcagatccagaaagctcagggcacacatctgacactccatccacctgcctgtctgggaggcagcagatccagaaactcagggcacacatctgacactccatccacctgcctgtctgggaggcagcagatccagaaactcagggcacacatctgacactccatccacctgcctgtctgggaggcagcagatccagaaactcagggcacacatctgacactccatccacctgcctgtctgggaggcagcagaccaaggtctagaggcccggatgtggccgggctgcaaagggcaggcctattctcagggctgcctgggaacctccaaggccttcggggactgtgactccatggtgcatgggctgatgcaggctgagccaggagggcttcctggaggaggttgggcagcactttggagaggccaggaggatggcacaggagaggaaggcctggggagatgaggacccggcctggctgggaagaggcccctggaggctgagggagaccaggcccaggccattgggccacgtcatgcgcagacaccacccctggcctggtaggagccagcatctggttcccagcagcagcttggaaacccagcgacagaaggggcaggaactgcaccctgagtctgcagaagaggctgctcttaatggtcctccatgctgggccctgagcccaggtggggcctggccagctcctcatcacagctgaccagccctgggagttccaactccaggagacctgggctctgaagtccctggagccagagaccctctgggcacgggaccagaggcagtgtcctcccacctggagtcctggggggtcctcccgcttggcgagtgctgccccccttgttgcccgagtgttgacaacagccacagatagtgcccacgtgcccgtccatgctgcgggtagctggccacaggggcgtggagatgcggtgtcagggacagagcaggctgctgcgcaggtcggggctgtctggggagcctcggaagccgctcggtcttgctctggggacaggaggggcaggtggaggggccctgcatgggcttccaaagcccctcccagccctgtgagggggagttccatggagtagtaggagctccgcagggtggggcggctggaggaagggctgatggccaggaggggccgtgggatgggggtgtcatgcccactctgaactcaagccccaacggtgtctcacaggccaggcttagcctccccactgcatcaccagccctcggtggtggcaggcaccctgggaaagagccgtgagagccagctccctgacagcctgggcgggaggttccgggccccaggcacagatgccatctcccttggcaggcctggcagggcggggccttctgcggtgacctgtggtcccattcccaggctcctcctgtgcttggaaactttctggagcagggaagagactcagcccaatgccctgggaagcaccctgcatggctgagaggtcctcggggaacagaccagtgggtagagagagctgtgtttgctccaaaggctgggcgggtggcagggggtgggggactggaggttagaagctggcaggtggaaaggatgggtgttcaggggagtatttcaccagactatgcaaggtgcggactgcgccgtgaggtcagggtgggtcaggagagatgggaggccatggctgtgttcaggaagtgggcagttggcccagggagctgcccagggcctgactacccccatgcaccccccagggaccatgctgggcctctgcgcctctgtacaaccactgctccgaactctgggacccacggtcggcggcctcctgtaccgcagctttggcgtccccgtcttcggccacgtgcaggttgctatcaatacccttgtcctcctggtcctctggaggaaacctatgccccagaggaaggacaaagtccggtgaccgctgcccagacacagactggcaataaactcctactaaatccctccgacctcttccggcctggtttctgcaggctcacgcatggtctgcctgcgtccttcagtgagggatggggcctcgggctggagggcttcctcaaggagggcgcctacagctgggcaaagctctggggaggacagaaccacccaaattggttcactgttattagtacagccctgagtccgcccatggaggaggtccccctgctgccacacaaacagctcttgctcacatcccaagcaatggcgagctcactgcccaactcccgcccacagtgtgcctgcccaagagcagaaacaggttgctttaaaagatcagggaacctggctgggcgcagtggctcacgcctgtaatcccagtactttgggaggccgaggcgggaggatcatgaggtcaagagatcgagaccatcctggccaacatggtgaaaccccggctcttctaaaaatattttttaaaaaattagctgggtgaggtggtgcacgcctatagtcccagctactcgggaggctgaggcaggagaatcgcttgaacccgggaggcggaggttgcagtgagccaagatcccatcattgcattccagcctggcaacagagcgagactccatctcaaaaaaaaaaaaaagatcagggaactgaggccttcctagatggaaggaaaaatgccctcattctgctgaacagtccagcacacagacccaaaccctggtcgcagaactgtaccaaggaggctgccagccacccgaaccccagaaccgcaccagacactgccagccacccgaaccccagaaccgcaccagacactgccagccacccgaaccccagaaccgcaccagacactgccagccacccgaaccccagaaccgcaccagacagtgccagccacccgaaccccagaaccgcaccagacactgccagccacccgaaccccagaaccgcaccagacagtgccagccacccgaaccccagaaccgcaccagacactgccagccacccgaaccccagaaccgcaccagacactgccagccacccgaaccccagaaccgcaccagacactgccagccacccgaaccccagaaccgtaccagacactgccagccacccgaaccccagaaccgtaccagacactgccagccacccgaaccccagaaccgtaccagacactgccagccacccgaatcccagaactgcaccagacactgccagccacccgaaccccagaaccgcaccagacactgccagccacatgaaccccagaactcctctggtgtccccttatctcagcctcttcatcctacagctcagtggcccccaacattttccgcaccagggaccagttttatggaaggcaatttttccacggatgtgggtgggccagatgaaactgtttcaccccagatcatctggtattagattctcatggggagtgctcaaccttgatccctcttgtgcacagttcacaacaaggttctcgtccctgtgagaatctactgctgccgctgatctggcga

SEQ ID NO: 553 - DNA, 18848 bp, Homo sapiens
  source 1..18848: mol_type = genomic DNA
cggaggcccaccctgcccagtagatggaacaggggctgagcccatcatgtcactgtcgggggtcccagcccttctcagccttgggccagaccactccagccccgggatctgcctgtccaggctggctggaagctgttgtactgggtaaaagtgaaagatctgcccgaggtcataggggaaggggctgtgaaggaccatgcccctcccccgcctgcagcccttcctggtacagacctcggtcgtgcgcgcacgcacacacacacacacacacacacgcacgcacacacacggtgcttcaccccagccaggccagaccaaaagagaccattatttcctgctgcctcccttttggcccacctaccatgaggcagggagccccctcctcaaaccaggagcctcccagatcgggatggggactgtcagacacctgttggagggtccagcagcccatgagatctaagcccctatctcaggtgagcctgtgagccagcagagagacctctgggagggagggaaggtgcggtcccctgaaccccaaccagcctgcctttgagtcccaagacacccccacccccatggaatgctgtggcagtgtgcagctgcagctgggggagcagggcgggtcttctgggtctcagggaagcgagatctgaagtgaggggggtgaactggatgggacagggcgttaacccaggagaggggccagggccattcttggctcttgatggtggaaccaaaagccatgatttatgtgcaatttcatattcttctctgtgcacaatttacaaatttcccgcaacaagcccagatgtcacaattttcatcttaggaaaacaaagagaagctgaagaaggctccccaggccctgcgaacccctcaagcagggctcatatcaactggcctgggggcagaaagaggcaaagtctagtctgctccatgcccctatgctgccacctccccagagactaggagcaaagggctagagtgggtagtgacctagaggcccccggatacccacactccaaccatcaggactcattggccttggtgacaccactcagagggtgtagctgccatcatcctgtgttatagaagagcagcagagaccgcgtcagccgctgaggccgcacagctggaaggaagcagggctcagaactcccgggctgcctggctttctggtttggtttccacttaggtttcctacttttatttttccactttaccagcttaattacagagtcaaacccagtgctgtggggattcctccgtcttggcctcgttagaagctgagaggtgacctgctctaagtctgtcactctgaattcgatcaaagatggtacccaatagcattttaaacctgcacgtcccaggagcggggctgtgtccccccagcccaagccagggacacacctggaggaaggcaccccaggagctgggggctgggagttccaggctctgagaggaggcccaatgggcccagaagcaagcaaacatctgtctaggtgcaacaatcaagctctatttttgtaattaaaaatgtatccaaagggaaaaaagaaacaaaaggaacaatatttgtactctatgttgctgcagagagcagaactgcggagggggtgctagtcccaaggggtggactgtgctgtgctagtgccctaaatcctgcaagcgcggggttgggggggcgggggagaccgctgtcgggggtcgtgagttccgggcccttgtgtgcatgttcacgtcctgtcattcttgcccccagctgagagagcagtagaggaaaggcactacatccaccagcctttgcattctcctcggagcacacagaaagacattttccagttatcttgcacacaagtgggcggcgggacccgttttggccgggaacgttgtcaggaacgctgtacaccacttccaggcggtcacgtccgagctgcccaggcagtccttctgcgccctctgctggccagatggaggctgcagaccctgcggggccatcaggagagaaccaccaagcaccctctgcacaccgcattgcctgtgttgggcacaaagaataaacttttattgcatcttaacccactagaaatgtaggcttgtccatcacagtggggcgttacataccctaatacatagggaaggcataggtagatttcagttggccttttacagacaaggaaaccaaggcttgagaagattcaaaccttactgcagccatggctcacacctatataccctcagtactttgggagaccaaggcaggtggctcgcttgagcccaggagttccagacaagcctgggcaacatagagaaaccccatctctacgaatattttttaaattagctgggtgtggtggcacgtgtctgtggtcccagctactcgggaggctgaggtgggaggattgcttgagcccaggaggttgaggctatagtgagccgtgatcgtgccactacctctagcctggacgacagagcaagacgccctctaaaaaaaaaaaagaagaagaagaagaagaaagaagaagaagaaaaagaaaaacttgctgcccaagcagttaaggcaggattaacctgcagccctcactgctgtgcgttccttctaggaaagacccagaagccagagaagcctaggtcccaatcctggtggatcttcgtgctggaatcgttaagccagctgtttcccaggggccacccatgggccagtcctcaccacaacctcatgggtggtcggtcaatgtcgtaggcccgctttacagccgaggagacagaggcttccagaggcaaacacactggtccatgagtagcagaacgagggtaggcccaggaagccatgtccttggccacatgtgctttctggcgggtgacctccactccagtgcctccccggctgcccgaggcctccccttcccgggtgtggcagctgtacagctgccttgtcggcatgttcatggccccatcaggaatgtgtgccgcaggtggcttcacagggctaggaatgcccgtcctaggttaggcccaatccctacccagagccccagggaacccaaattctgggacacaggacacccggccagtgggccaatggcccctatcagggagtgaccaaggacaggccgggagctcttctttcccctctgacccatggtgaaacctgcctcgggcctgttccctgggttctgaggccctgagctatctgtcttcaaacaaacgaaggcctcaaagaatgttccattgagccatgggccccatatcacccatcaatcacaaagggctggggattgcaggcacagggtcaaggtgggtaggaggtgagggctggacaccatctgaatctgtgctgttccagggcccactagagagtctccaggtacccggagcctgccctcagcagtaccaccctcccacagcaccccagggaccctgcaagaggtgtctgtgcccttcccggctgcctccccagctgctccccaggtggtgccctgtggagaggaccagagggatattataaacaatgacaacacttgctgccttcatcttgtgcctgctcagggccctgccctaacccagggctgggctcgttgcctcatttaatccttccaagacccctgagagggaggtgtgttcgtgcccattttgcaagggaggggactcaggctcccagaggttaagccacctgcctgaggtcactgagacttgaggttggccctgcctttcacccagcctgagcccctccataggacttctgtgagggcacaagaaagcaggaaaagaaagaagtcaagggccctgggaatctcccctgacatctcccaccccaagccctagagccagggctgggcatctgtgcagggtacaaccctgcccagggatgcctgactctggaaaggccacccctttggcctcaaaccacatcacccagcagcaggtcctcagaccagccctggacaggagcttgactggctgtgcccccaaaggccccagagctccctgcccccactgagcctccaccttcccatccataagatggggtggggagtcatccagcccagaggccccaggggcatggggagtgacagattaacccaaggccccccctcccgcaacaggcggctcagcacacacttggcggggggccatgctgggccaggagagctcccccgcaccagttccccgcgcgcaaggctcgccccgccccccaggacaggctgttcttggggcggctgccaggcacgtcctccgcaggtgccggcctccctgcggtgacgtggccacatgcggcacaagctccgattacagggactgccttgtgctgggggttccggccaggggtcctcactccccaggaaccgatgggcggagctgggcaggccctgaggagaggcccagtgggaatagggaacagtcacccctgctccagaacgggaccaggggctgcttcccttggggtctggaagagagggaccccctggtcccagcctgcctgagactgctggtttcggcactgaatgttccaggaaaccgagggccactggtcatcgtgggcttcacacggcgcctttctgggctaggaagggggctcccgggctaggaagcaggtaccgaggagggtctcaaggacatgtggggacctatgtcagacacccctgcagccagctctgagcccaccaggcctttcctcctctccctgccaatccacaggacacagacacaggggtcccaggcccagtggctcactttatcagggaaacagcaggaaaaacaaatctggtgtgagcagatctcccttcccaccaagccccctgacttcctgctggagctcggggagacccctgtgaccagcatctcctgcctacggggggcgccagggcctcaaagcctctccaagccactccctcccaccctgctttccacacccaagccacagcgttcagagaagctcagggcctatttgaaatgccagagagtggggatgcctccagagaggtggcatgagggcccccagatgcaccccaccactccctcctccactgcaggaggaggggcctgcagttactgaggaagcctcacccctactgggccctcgggggtgaaggggcttcccaggccttgagggagactgtatttcagatgtcagttaaaagcgcctgctacatggcgtgacctctctgaatcctattactttcctgtgcaggaaactgaggcccagagaggtggagtgaccggcctagggtcccccagcaagtcagagacagtgaagccacctcctgccctgggctggggtcccgccccactgacctccagggtcagagaaggaggggagcccccaacacttaactccttccttctttccttcattccttcctccctcccattctccacctcctcctggctgagctttgaagccagggcagttggccagaccgagcgcagaggccaggaggtgacggcaggcttgccctggcggcctcccaggttaacacactcccaggtggctgcaccccacaggcgagggctgctcagagtagatgctcaaccaagaggttgcccgtgcccccttccccagccgcaggggcagccagaagccaagcagcctcccgcccactggagcctggagcctgagggctgaagctgggcgcctgctgccccctggcgtcccgaaacggcacagccaccaggacccccacccacctcattcatgcctcacacctgggggtgacttgggccagggccttgctctctggccccgagtcccctcaagtgtaagatgggggctctgcccagtgtggctgtccgggctgcagcgggcaggagcgcatttttcacaaaccccaacacccctcggatctgggggtggggcggtgtcactcgcacctcagtgggaaacagcacgtgggcctcgcccgtctccagggggtgggggaggggagacaaagagcccgctctgcggagaggtgggtacccgccctgccgcccctcccccatttcctctctgctccccctgcccctcctcccctccctcctccttccttccctcctcatccccagctcctcctcttcctcttcctgccctatccccccgcaggcccggccggcagcccggcgccctctgccttcgttcccgccattggcgctgctgcccggagcccctaggtgacagccagccccgaggctgcagcctctgtgtcgggcctgcacctgcccaccgcgtggtcactgcctgggcacgtatggacactcacacccttcagtcctgagcacaactgtgccctggctgcttcggaacaacaaggaatcatagtcctgcttctggctgggagctgggggccagcaatcagggcagctggggaagtggttagggaggtggcggcacacaggccgagctcagagagtgagcagagaatgggcccaggggagggcgctggagagggctgcagggcttggggctgcagctcaggagctggcttcaccttggaggctatcagacctgctcctcagcattggcccagcaaggggaacagtatggggaacaggggacaggcactgcctggccagcagcaaacaagtaggctgtggagttgggcagagcatctgcctcttactagctgtgtgtccttgggcaagttgcttaacctctctgtgcctcttctttctcatctgtaaagcttctgatgaggcttaaagggcaagtcagtatgtgcctggcacagcggccttcctcttgaggatgccactaccctcaccatcatcagcctctccctccaacctagaggggcaggcagggcagagagctgccactggccacccctccagctgtgctgtaatgaaaactggacattcactctatacccagagatgtgggctggcggggaggaaaggcacctacacccctgccatgtaaacaggcaggcagggtgaaaggggtttggtttgtttgtttgttttttgagatggagtctcaccctgtcgcccaggctggagtgcagtggcacgatcttggctcactgcaacctccgcctcccaggttcaagcaattctgcctcagcctcccaagtagctgggactacaggcgcctgccaccacacctggctaatttttgtatttttagtagagacggggtttcaccatgttggccaagctggtctcaaactcctgacctcatgatccacctgcctcagcctcccaaagtgctgggattacaggtatgagccaccgtgccaagcctaggatgaaatgttatctacatgatgagcagtttgggcagtgaaccccacctttgtcagagttcaggacagtccatgggatacaggtcactccgactctcatgcatcagtcttcacgccagccctgagtgagcactgaggcacacgtgcctagcacccagcagtggccccatcccctagctgctggtcagtaccagctgccactgcagcacaccctttctgccaggcagcctcatgccatgcacttgatgtgcaaatgatcttgtctaatcttcacaagcatcccgtgaggcagggattaacgttgtccccatttcacagatggggaaactgaggctcaagagttccagacccaggcaagccctggtcagtggtgaagatgccagcctggtggggctggctgcagagtgctgggccctgtcataagcacaggcctctggcacgcatgctgactgctggggattttaagattggggcccccctgctgagccctatctacagctgcccccttccctgggttaccccaggttttaatttgaagcagttagtgaattgagcttatgtggggtcttatttgtatttgcttttgggtttttgctttttgggggagtttttgggttttattgagatagagagtctcactcttttgcccaggctggagtggagtggtacaatcttggctcactgcagcctccgcctcccaggttcacgattctcatgcctcagcctctcaagtagctgggattacaggcatgcgccaccacacccagccaattttttgtatttttagtagagacagggttttgccttgttggctgggctggtctcaaactcctggcctcaagtgatctgccagcctcagcctcccaaagtgctgggattacaagcatgagccacctcgcagggccctgtatttgggtattagccatggcagcctggcagatgttgctgagggtgtctgggcacctgggcctgggcttggcggcctgagcagtgcctcctcctcaaatgtcaaattgaggcctggactaagggtgtctgatttatggcctcacctgtctgtccgtccattcagcaatatctccctgggacctcaggggcaactgtgccttcaggggcttccgggtgggcaggcagaagcagaaataagtatacaaggcagggtggtgcccaggttgtatgatgaaggaggggacgggggattttcagggcaacgacttgtgccaagatccaaggatggaagggaagagacgtacaggcaaggggaccattccaggcaggggacacaggcagagacccatccaaagatgagtgcagggcagacagtgcttgaagctggagctctctatctctcatgcttctttggtttgcaaaatgtggcatgatccagtgggggctgaggggccagggctccagggctggctgccccaggaacacagcagtgtcaccagaggtccagggtgggaaccaccagagttttagaaactcacccagccatgtccagggtgcctggagcagggaagggaggctgctacacctcactgagatgccagtgtggctgcccccggtggaaaccaaatagccaggctccctgaagctgccagcaagtctaggggcagggaggacaggtgagagctgagaggcctccaagggtcagaagtaattgcatgggttttgcgacttctcctcttgcttcttggaaatccttcctgcttctttctggattccctactgaattctgaaggttctaaaagacctggaggctgggcactatggcttatgcctgtaattccagtgggaagatcacttgaggccaggagttcaagaccagcccaggcgacatagcaagatcttgtctctataaaaaaaaaaatttttttttaattagctgggtgtggtggtattcatctgcagtcccagctaccagggagactgaggcaggaggatcacttgaacccaggagttcaaggtggcagtgagctatgatcacaccactgcactgcagcctggatgacagagcaagaccttgtcttatgaaaaataaaataaagagaacatggatgtgggttggatggtgagagcttggggctgtcctttgttcctgggtgggggaaagggactgggaccaaaggaggctgcggttgagggagacgtgtgtacctaagagatgggcagtagctaagctccaggccctcgggcaggtgcctgtggggggacagaggcactggtggccatgccacccatcctgcctgagtttcccagttctggctggtgagcaggtgtgaggctgctctctcaggaccccgttcggaggcacatctcttcctgatcccacgatgcccttcacatgcacacacatgctcacatgcacacatacacatgtgcacacaccccaccacagcccttgccagcctgggaccgccagctgctggctcctccccctgcctccccggatggacatccgtcctttgcaagggctgttcttccttcttccttcttcctgagtcctgaggtcgggcaaggcatccctcaagggagtccacaggttgggcccaccaccccgcagttcccagttcctatgccattgcctggctacctccccaacctccaccatcgtcccttcctgcctccaggtcaaggaccggagagagtccctctggcctccaagggtcctatgaggggagggtgacccagtttgtccggagctgtcccaattttggcatgggaagtcctacatcccaaaactcctcagtcccgagcaaaccaggtctcccccaagcaatgagtgagcttcctagagcagggtcccagctccaccacccatctcctctggtcccttggcctgtggtatgagaaaggggacgtgggctactccagactacactctcactgtcccccaaaggcctcaagggctccagtcttcaggccccacactggacgcctcccccatgctgccatctgggcctttatctccttcagctgtggctgttggccagcgtgaacacaaatacgtgaaccacagcccaccatgttggagccccaggtccaggcccacagtggagcccagtgaggggagagtgctcacccatccaggaccacaggactctccccaaagcccatagcacgttgctgccctccctccatttggacactggtgtcagggactgggcccttggccctaagcccgtctgggttccctggttcactagaggccagtggagaagcccctgttggcagagcctcctccggggccctggccctaaaggccacaattccacacacctctcatgggatgtgtctgagcccaatgcccagcccggcaagaaccagccctggatgaggtccagcccctgcccctcctcctagaagtctctgcccaacctccaatcccagaagcgcattcagagtccagttctagaaggttcctcagcacctgacagcccacttcctcacgtgcacctgcacagccggggcctagcagatgagagacagcatgggcaccaccaggccccccgcagggctacctggcaagcctagcccctttgggctgaaggctgacccctgggtcccaaggataccaggtcagggggtgaaggacctttgaacccagcctcccagactcttaacctgacacctcccagatgaagccgaggccaggcacccagtgcccacagcaggctgaaggcccctcataaggctgtgattcccaagacaacacatacaaagcctggggtgctgggacagagccccagcagggtgtcagacacagatcccactgtgggatccaggcagcccccattgaccaaggtctgcaaccgcacctcacctggctgagaaggtgtaaggtgggcgggaaccgaggttcgggcgggcaggagtcacatccaaccctgcctccgctctagtcccgccccaggcaaaaccttgttggctttattgagacaggtccttggagaatcataggagtaagagtacaaagcctcaaggagaacacgttcacttcacccatggagtaatggcgaaggccagagccctccccgctccttccagatcacccttctgtcctctgcagcatcatggagtaatggtgaaggccagagccctccccgctccttccaggtcacccttcagtcctctgcagaatcatggagggatggtgaaggccagaccctccccgctccctccacatcacccttccgttctctgcagcatcactcttttaaatcttaaaattgtaaacaaaggttctctctcttcatcccacttcccctccagccacagtcccatttctcagcccccttttggtgcaaaacccttcagaagggtgtccagcccattcctcctgcttgaatcccgagggtcagcccccatgctcatgacgctcttgccaaagccaccagtgactccagctctcggccccagggaagctcccaggccttcactcgcttacctgcctctctctccagacccagctcctttatttttccctccctttccctggtcagaaccctgggcacctcctcctcatgctggggtccagccttggcccttggcccctctcctctctagccccatccactcctggtcatctcatccagggtgggagctctaaacaggacatgagtgtcaatgacaccctcacgtccagctcagaccacatgccgcaaactgcacactgcacactctgccctctctgctggcccacaggcccctcccgtggatggacctgcagggttgcctcccctcatgtcgcccccagccgcacctgaaggccccctcagttggccctctcagcccaggccccaaccagcaggaagcctgtcaggcctccttccagggaggttccaaacctgcccctcaaatccccccatgccccatccaagtccacaccacctctcatctggaccacagcagagacctcctgcactgcccctcccctcaacccctcatcagcacatcagccagaggctccttggagaacagaaggggctcagaaccctgcagcggcgtccactgcacacacaggaagaactcaagtgctcataggcagtgagtcatttccttaggcattgtggtgacccgggatcatgtgcctccccgaagcctgcacatgcactctaatgatgcaagctaccaccaggcggtcagctttgccagctgacgtcccaaacagctggcatggggcatgcacacagtaggtgcttaataaatgtgtgtcgggttaagataggcccaaagccatttcaaatgtccaggcagtggtgtaggcaggggtcagctctgaagctggcctcctctcattcgggagacccctcagaggtcccagcctccaggatgcagtgttcagagcaatacttctcagtgcacgtctggctgtgtccctgcccagcgctcccagggtcacccctctctctagactcactttctgccccgtcaccccactgtacacccttggtcccagccccttccagtggctcagcttcctgaacactccaagcctgggctcacctctaagccgttatctatgctattctctcagccaggatgcccttcccatacccaaacaatccgtgctcacctttaagactggctgaggcatcacctcctctgagaagccacctctcccaaacctgagcccagatgagccaaagcccttccttcctccagtcagcctggatcctctcatccggcagaactgtcgccttgcttctctgaagcggtgaatgccctggggctggggacgcacaggctcgctggcccacaaccaaagccgcttcctctggaggaggaagtccaggggtgccagggttccacttgctttcttcttcacccagcctaaagggcaattttcccacattccctcagaaccaggaagttcccccattcacactgagcctgttcatgacaaaaaaaaaggtctctccgatttcctctgctcaaccagttccctggctacctgaggccctgcttcacctggaggaagacagtggtaagtttccagcatctccaccacacctcagcgccagaggaccctcagcctccctcgcacacctctgggcagtttggtaactcatcccatctcctcctgccgcttcatcctctaagccctccccagggaacccaggaggcgtctggaacctgttggggacagtccctcacacctgccccattgagtaagggttcatgtggatgcccatcctcccccaggagtcccaaatctaagacactctgagactcctgtcacccacccccaccttacacagccggcctttctgtgcagtccttccaggaaactctggctggacctgggctctcggcttgactgcactctccccaagtccccagggcggccagtggtgactattcttgaaaacgagcttggcagaggatctggggacacgcactccagatgcaaacacgtttgcactctttgggctggaatcccctcgagcggtacactgcacccgtgggcttgctaagaaaccacctcacagagggcagattgattggacaaaaggcatttggtccccaaattgattgacgtgtgtgaatgggagttttcagaacaaagacccaaagatatgggggaaacaggctgggcgcggtggctcacgcctgtaatcccagcactttgggaggccgagggggggcggatcacgaggtcaggagatcgagaccatcctggctaacacggtgaaactccgtctctactaaaaatacaaaaaaattagcgggggctgtggcgggcgcctgtagtcccagctactcgggaggctgaggcaggagaatggcgtgaacccgggaggcggagcttgcagcgagccgagatcgcgccactgcacttcagcctgggtgacagagcaagactccgtctcaaaaaaaaaaaaaaaaaaaaaaaaagatatgggggaaattgccatttctgatgcttaggctcaacaaagtatggacatccatgcgggaacacagatgaaccaagggacctgcactaatgctcctggaccgcaaggggaagcgcagcgagggctgttggtctagatttcttgaactttctgagcagcattccttccttctgggcatggagcaggaccctcctggaatggggtcttatgccctacagtcaaacaagagaggtcagataatttatggccagcttctaaacacaaaggtggagggaaagttagagcaatatttttaggtttgatgtctggctgtgtggaaaggcggggttctgatttctatgacctgccctggggaaaatggattccagtttctaaggccagcttcggggaaaatggcactgagagacaggagagcaagagaaggtcagagaaacactttttcttccgaagctgcttctgaggccttcattttggggtattgttttctgatgcccaacatatctgagctgctgaacgaagggtagctgctgaaccactcccacggtgacttggaatggcttagccagccggccttgggccacctggctctggcccccctgcccaccaggactttggccggctctcgctcgcctctgcgatgtccgtcccaccctgtctcacccctgcagttttctgctctgtggagcgatgattgacacatggcagggggacactggttttgacatttgagcctgtgcccagcccttgcctggggaggaggtggggcaggagtcctgaatgagcatctccctacttagtgacagtcaggggcacggagaatggtgcccaggccaagggcagggcttgggccaagtgtgcgcagcgtggggtgtgtgtgctccagcggctcctgctgcggagggcggcatgaggcttgtttacctgtgtgctggcatctctggtggcccctgcaagggtggggaagtggcaggcagggtgaaatggggaaaagtgggctctcaactgctcctagcagcctccgggtctggggagggaagtgaggaggggcccagagctgtctcctggtcactcttctggggctctgtgcagacctttggcagggccaggctacaccacaccctctacaacctcccctgacttcttcccctaacccctcaccaccattcctccgcttttctctccccgcccctgcctcccctccattctctccttccctccacctcccggtcccatcccctgcccacactgcccctcctcaggcccaaagtggacaccggtgctgcctgagggtcagagtgtccacctccagcagcccgggcaccgggcaggattcaagctggagggggctggggcgggcgaagccgggcacggggcgagcccgctggtgggcggggcaggggcgggtccttcgaggggaggggcgggctcggccagtgagagcgcagaaaccgtggcacgggcgctcccggaactggcgattgcaaagcgcgagggctggaactcagacccagaggggcggtccctgttgcaagtcatctcccgaaagggcggggccggggctcatcccggaaggaccggtgtctaggtcaccctggagcgctcaccccaccggcacccgtgcccaagcccgcccctgcaaaggcaggtactcgagcacactccggagagggcggcctctgagccccgaaccccgaactccggcgcagcgtcgcacctctgcccaatgaggtgcccctgacgtgcctgctgcggctgccctgctccccccagcctccctgcatcccgggatgggggagggcgccaggcgcagctcccggaccctcaggggtctccccgccctaccccaccagcctgggttcggtacctcggggctcagatgtgcagtcagctgttaatgtggcaaaatttggggaagtcctctgcagccgcaaaatccagttcccaccagttggaggccgggcggggaagggtggggacagacagcactccgctgtgggaggtaaggcagagctactggggagcctggaaggctgagctatgtctcccctacgcaagaccattccagaagccccttggagctctggctgctggccacaggggaaggtagaccttccctgagagctgcactgtgttggggacagggccactgtgggcctacggagggcctccaggcacagggacccacatcagccctctggccacagaaggcgctgatgatttgaggtggactcagccaccactccgagcctctgcctccctctaaaagtggggcatggcacattcctgtgtcaggcaaccaggcactgagcctggcccacctgcaggggtcggggggagcagcttgtccctgtctcccctccccgggaggctgtgtgcctggagaccagagctgtcaaaagtggaggagggggaccccctgatgtgtcctctaaggtccaggtagcaggagagctccactggggagggggtcctgcagtgctgtcctctcttgcaggcaaggccaggcgggtgctgcctgggacccagtgactcagcacccctgcccggatcaactggacttttgccccctgctccgccagcctcctgcttggatctctcctgggtctccctgctgcgcctgtccaggatgcagggagctcgggctcccagggaccagggccggtcccccggcaggatgagcgctctaggccggtcctcggtcatcttgcttacctacgtgctggccgccacagaacttacctgcctcttcatgcagttctccatcgtgccagtgagtaacacaccccagcccctgcagccccagccagggctgaaccgctgttcctcctgccctccatctgggccgtcgcagagagtgggggtgggggtttcatgctgccagggcccctcccagttgggactcatgccacgcttaagctgagtaagttaaggactctgcctctggacccccgtcagcacatcctgtgctccagcttcagtgccagccccgggagaagccatggggagccaccccacttccctcctgggggcagcacctcctcaaaccttcctagcgctgttcctcctgcctctcacccggcagcctttgccctctggagtccctgccccaagggctgttcaatccggtgtggctctgggcggatcacccctcagagaggctctccttgcacctgcccgcagcttctatctctcccctccatcttcttgggtccttgttgtccactaaatgatctgtggcggcaaattgatctcaagctttttcttgcaagagatagaatgctgtcttattttattatctctgttgccaaatgcggaaacatttcattggcaaattcatgttagtttagtgtatcattcagtagtctataccacagtgtgtggctctggaagctgtaatagtaatgattaaattatattcaccaagtctggagaggcttgggaacaaagtctcacatcaccaagaagctcaggcagagtcagggccaacctcggcccttcctgtgtttgcttctgggaagcccggcgtgcgtgggctcagacagctgccctcctcctctcagccctcagagcctggacctgggcatctaggcgggagtggggatgggcctttggcaccattccgggcctggcagaggctcccagcccgagggtgagcctaaggatccctccccgccgtgcctcaggcgccccgcccactcctgctaaatggctggggccaagccctgaatctcctccctacccgtggggaaggctgggcaggagccttgcttttctcatcataaaatgggtaataacagtccctccctgtaggattggtgcggggaagagtgaatgagaagtcagaacccttcccacagctgggcacagagcacaggtggagtggcttcagccacccatcgactctcatggggagtaactccgtgctgagtgcccaggagctgaccctgatgtcagaacctgaaatattgcagagtgtaaaaatcctcaacagcccactccctcggagctgggggtccacacgcacaggggctgcagtgggaagggggcgaggtcttcctcatagagaaggcaaccttggagcagggctggaaggaagcaggagaggccccggggcagtggagagagcagagtggctagagtggaccggttgaggccagaatgggaccacaccccacctgctgctcaaagaactccgggctggtgatggctgtggaggaggtgagaggtggctggattttgcatgtgttgtcaatggactgtagtgggtgtgagagaaagcagggctcagggagcactgaagatctgggcctgagcccataaggaaggaggcatggacaggaggagagggaaagatgggagcccagttggggacgggttgagtttgagacgattttcgaccccagtggagagccgaagggagctggacacaaggcagttcagcacagaggctctggggccctgcagcatggagacggtcatgggctgggctcccccagagggcagggaggctggaggtcggatgagctgggggaactggcagtggtgatggaggaggggcaaaggacccagcacagcccagagcagcagaccatcgtggaggagggaagaagccacgaaggcaactgtcactccagtgggaggcctgccaaagcggaccactggaggcagcagtgtggggtcaatggggacctcagggagaggggagacagcaggaggttttttgtcc

SEQ ID NO: 554 - DNA, 20646 bp, Homo sapiens
  source 1..20646: mol_type = genomic DNA
gccctgtgggtcatggtctgtgagaggtggcaggaatggggaccctcaccccccaagcagcctgtgccctctggccgcactgtgagctggctgtggtgtctgggtgtggcctggggctccctctgcaggggcctctctcggcagccacagccaagggtggaggcttcaggtctccagcttctctgcttctcagctgccatctccagtgccccagaatggtacagcgataataaaatgtatttcagaaagcatcagcgttttttctttaattaatttttttgagatggagtctcactctgtcacccaggctggagtggtgatctccgctcactgcaagctccgcctcctgggttcaagcgattctcgggcctcagcctcccgagtagctggactacaggtgcaccccattaccatgcctggctagtttttgtatttttagtagcgacggtgtttcaccatgttggccaggctggtcgtgaacgcctaacctcaggtgatccacctgcctcgggctcctaaagtgctgggattacaggcatgagccaccgcgcccgacctgcatcaacgtttgctcagggggcaggtggtcaggctgatggcccagctgcaggcagggtcatttccagcctgcccctccctgaggctgcgtgccagggttcatgtgtgccctccgcggctctgcactgaccccgccggtagctggggaggagtttgggcttggcgcctccttcgtgtagtggctgaagcttcccgggtgctcctcattcctgggaagggagtcgggtgatgggaacggtgggagctcagcgctccgagtctgcggccgggggccagcggggctgaaacgcgcctcctgagtgttgaaagcggcaggcgccggcctttgcacccagaggccagggcgtctcactcaccttcacatccaggcctcttaggggagcgcggctttggcttttccaggaaggaatggactccaacggacagggaaagaagaagtgtggagagacgggcaggataagcaggcactgggcccaagccgcccttggaggctctgcctgttctgatctgaaggcggaggctcagccgtgctctcccaggaagccacctgggcgtttggggctttagctaggaaagaggatgtcgcctgcggctgcgaaggcgccaaagcccagacctcgcgcctccgcccgcgacggcggcactgggggcccggagcgggcgggagacgtggattactgcgggcttcggggccctagcctcgaccgcgacgttcgctcgcatcgcgtacggacagaaacccgtgagcgctgaagaaagaacacctgaatccggagccccagcccccgtcgctcgtttgcgcgaccccaaaacctggcgggacgagggtcgcccgatgtctagctgccgccacagacgacgcttttgcgtctgcgcagcgcgccgccttgtgggtaatctcagggtgagacgaggctagcgcgaggtacggctagagcgtcatttccggctcgaatgcccggcagccgtggcggctagagcgttcctccccagctcgaatgcccggcggccgaggcggctagagcgtcgcctcctcccggggaaccgcgtgtgaccttccagcccgcggaccgatgctgccggcggccgctcgccccctgtgggggccttgccttgggcttcgggccgctgcgttccgccttgccaggtacgcgggatcctggggcggtccgggccggcaggcgggttagggggcagccgggcactgaggggtcgatccgggcgaggagggcggcggggccggcctccctgcagcggccaggccgggcttgggggtcccatcgggggcgcggggaggaggcctcccggtgcgcacgccccttccctcctgggccgtggaaagcgccggggtcggccccagatgaccttggacgattccctgctcctcccttggcctcagccttttccgcagcaaaggcccatccgtgggtgcggcgttttgcggccaggggcccccatgttttgggaggctttgcgcaggaagatgcacctaagtaatagtttcgccaccgctgggttgatgtagttcattcaaaccagaaacttgaggtttgagtggtatggctgcaaataaacacgtggctttctaaggctctttgaagaatttaaagtaacttgcaaatcttatcaatacggaccccttgaggtctgagaaccctggactgggaccaaggagctaggtaatttccggccctagtgattaccagcctgagcttatggcacccaccagtcccccagttgtcctgcccctctggtttctgcagccccttccattccaggactgacaagtctgttttaattgggggtgggggctaggcgacaggtgccatgtgtctgtgccgtgcgacatatgaggagcagcggccatcagaggtgtgaggccctcgctggtgcacccctggataacgcccccaaggagtacccccccaagatacagcagctggtccaggacatcgccagcctcactctcttggaaatctcagacctcaacgagctcctgaaggtatcgtgagagggtggcacagacccaggggctggaagtttcagggcccctgtgttttgttcctggtgtattttgggagtttggtaaattgtcaaaagtgtgtttgtccaggtgcaaggtccatgccaggctagttgcccctcctcagtaggttccggctggtgtgagggccagctgtggacactgttctctatctctgcagaaaacgttgaagatccaggatgtcgggcttgtgccgatgggtggtgtgatgtctggggctgtccctgctgcagcagcccaggaggtgagtcctgggcagaatgaggcatttctggggtgcccagttcgcctgtggcctcatgtgccgtggtcccgtatctcaggttctgcagctaccgtcattgtctgcagcctgcacacctgtgcggcatcctgcagcctcctgggacctactccctgccacggatgtgcacgactttgcatgtggagaccatgtttctaatggagggaaacagacactaagctgagagaggaaaaagaggctgggcgtggtggctcacgcctgtaatcccagcgcttcgggaggccgagacgggtggatcacttgaggtcaggagttcgaggccagcctggccaacatggtaaaaccccgtctctactaaaaatacaaaaaaaaaaaaattagctgggcctggtggcacatgcctgtaatcccagctactcgggaggctgaggcaggagaatagcttgaacccgggagactgtctcaaacaaacaaacaaaataaataaataaaaataaaaataaataaataaataaaaatacaaaaattagccggcgtggtggcaggtgcctgtaatcccagctacttgggaggctgaggcaagagaattgcttgaaccagggaggcggaggttgcagtgagccaagatcatactactgccttccaacttggcaacagagcaagaccctgtctcaaaaaaaaaaaaaaaaaaaaaagaggaaaaagaaaggaagaaattataccaaatagaacattgtaagcattgtggggaaaaggagggaagaggctcaaggtgggagggagagttccaagttcaaggtgggcttcaaagaggaggcagacattgtagaagagagcacggccttcctggcggaggacggggaggcaccaaggtcaccaggcaagagggtgtctgacaattcagggagcagcagcgaggtacaggctggcgcaggcgaaggggtgtaacaagcagctccgtccttgggtctttgcaaggaaaccagtgaacttgaagccgccagttgcgtttggtcatcgggttgcgtgaacctctccaccggagccctcccctcagcccctttcccccactggggaaccaggttgtgtactgtagagtgtcccatgttccagatgcgtggggtgcccatggggcagcatcactcatgcctgagaactggaaggtagtttaaaggctgattagattcaggccgagcgtttgggtaagaatagctgggattactgtagagcctgttgtgtaaactggattgcttttgaggagggagaagatgttattaatagccttcccaggccgtggggacacgcagccccctgccctcgggtggtgctgggtctccatgcgccacgtcagaagcgcagcgtgcccgtcagtcccatggcgggttgtcattttctcggcacacgtgcactgcagtgtggctgagaaaggaatggcgctgcttttatctacaaagcacttttggtgtcgttctttcctgtctcataagttacgctttctaagcgagaggggagtagagtattgagggaaggactgtgaagcatgtttttatttatttatgaaaccgagtctcactctgtcacccaggctggagtgcaatggcgcgatctcagcccccgcctcccgggttcaagcaattctcatgccgcagcctcccgagtagctgggattacaggcgcgcaccactagagacagggtttcaccatattggtcaggctggtttcaaacttgacctcaagtgatccacccgccttggcctcccaaagcgctaggatgacaggcgtgagccaccggagccaccactcccgtccgaggcatgttacaaagagttattgggcagacctgcctctgactagcatgagagaaaaagcaccagctggactcgcgaggccaaggcaggagaatcgcttgaacccaggaggtggaggttgcagtgagctgaggtcgcaccactgcactccagcctggatgacagagtgagactccgtctcaaaaaaaagagaaaagaaaagaaaaagcaccagctggttaaggattgatgagttgggagacgtgacttccaactccaggcttcgctggggcctccgctgcacctccctttggggctttagactggggtggcccagcagtggaggcgttagctccccccagccctttgtcacctggctccccttctttcctgctccctaaggcggtggaagaagatatccccatagcgaaagaacggacacatttcaccgtccgcctgaccgaggcgaagcccgtggacaaagtgaagctgatcaaggaaatcaagaactacatccaaggcatcaacctcgtccaggtctgtgccgcggtgggggttccgaggcaggttccgttgtggtggccagggcccccagtccctgactttgctctctctggcaggcaaagaagctggtggagtccctgccccaggaaatcaaagccaatgtcgccaaagctgaggcggagaagatcaaggcggccctggaggcggtgggcggcaccgtggttctggagtagcctccagctcggaggacttgtgttcaggggtcctgggccccgggcgaggtcccgccctcccgtggtcactggctccgcccccagcaccaggcgcccagtggagccgtttgggagaattgcctgcgccacgcagcggggccggacaggccgcacagacctactgtggcgggagggaggggcggctgctgcctggtgacggcacccggaggcccaccaggacgcgccaccggtgaatgtgcctctggtggctgctgagaaaaatacactgtgcagctcagtgtgtggagtgccgtgctcaggccgggctgccgggccagtgcggggatccgggcagcgtgtggagtgcggtgctcaggccgagctgcggggccagtgcggggatcgaggctggtacgggatgggaggcttgttccctgcctcctcagcagacatctgagagtctacagacattcatcaggtccccggtgtgcagggccctgtcctgagaccccacagtgggcctggtggacggcagtggtgtggaggacctgggcagcgggaaccctccctgttttcagtgttggccctctttaaggcaacaggaagttcagcactcgcctgagaaaccgaggcagccttggagccggcgatgccacccctagcttaggctgcaagtacccctgaacctaaacccggccacggggctgcgcagggggattggggaggggtgtgggatgcacctgccatctgcagggttggggtgtcagctgttcctctggggcccttaagtggggtatcctgggacctgggcaaagcggcaggaggggcttgtggacatggggaccgggagtgccgtggtcagcttggagcactggtcactgtgcacttggtgaggtgtggcccagtgctgggcagcccttggcagccactctcgggctgcagaccccttggtgccactgctgagtacagggggtgtggccccatggcctggctggaacggccagggccttgctttgaggacccgtggccgccttttcttgggcacgcctgttttcagccaagcctgggagagaatcagcgaatttctgtctcagctggcccgtgaccaaggccagcccccaggctgtgggcccacaatgaggccagagacaggccatgttccgcacctgcttcgggaaacatgcctggtgtgatggccccgtaggctgccatgccctccagcctcagttttcctggtggaaggatcccttggatgggaccagaaaggggcaccgtgtgtctggaagctgcccactggctgggactcctgggggagcgggaggggcagggagtttcaggctcactgtgcgtgtacaccctgcctggcccaggtcctcttccaaggccttctggtagagtttctctgactaacctgctgtccccaggaaaggctgtcccaagccaagcctggaagtccccattggccatggtatccattttgaggggttaatggtcttccctcaggaggtgacactgccacctggagctgggtgcattctgcctggtgccctgctgaccccaactgcctttcccctctggaaggcagcgaacatctgagctcagggacgagccctgcttgaggtcagacagacatgctgtcttcatccaggctgcacccaggccagatagaccagcaaaatctctgcccgcgactcctcgctgtctaccctggctcaggcgtctgccaggccactcgcaggagccaccgagaggccctttcctccctgccgggggacccccaaaataacctgtggatgccaagcagcaggacactgcggtggatgccaggccgcagtcggaggctggacggggagccctgtcccgtgagcttgctcagtctgccccaaccacccccttgggcctaccgacataacttatgatccgtttgagaatccatcagggatccttgtgagtccccgacctgcagttctagattcatcatttgaaaaagcctctggccctggatgcatttcctgttttcaggattcctcgccttctgactgctctcccagcatctctagctcacggagttcacaaacttcagtcccctacagctccttgcacttttgttctattttttttaatgttttatttacttatttatgtatttatttttatgaaacggtgtcagtttgtcacctgggctggtggtgcagtcttggctcactgcagcctccacctgccgggttcaagcaattgtcctgcctcaccttcccaagaagctggaattacaggcatgcaccaccacgcccagctaattttgtatttttattagtagagatagggtttcaccctgttggccaggctggtcttgaaccttatttttatcttttttaattttaattttttttgagtgagttttgctcttgtcacccaggctggagtgcaatggcacgatcttggctcactgcaacctccacctcccaggttcaagcgattctcctgccttagcctccctagtagctgggattacaggcgcccgccacaacacccagctaatttttgtatttttagtagaggcagcgtttcaccacgttggccaggatggtctcgaattcctaaccccaggtgatcacccacctcggcctcccaaagtgctgggattacaggtgtgagccaccacacctggcctatttttattttttaatatagacacgatctcactctgtcacccgagctggagtgcagtggcctgatcaaggctcactgcagcctcagcctcctgtgcacaagcaatcgtcctacctcatcctcccaggtagctgggactataggcacgtgccatcatgcctggctaatcttttgattttttttagagatgtggtctcactgtgttgcgcaggctggtctgaaacgcctggcctcaagagatcctcctaccttggcctcccaaagtgctgggattacaggtgagagctgccctgcccagccttttttgttctttgtaaagctcttcagttcctgctccttacccgctgggccctgctctttctgctttggagcagttcttccttcagcagggagccagtgttctgtgggttggggggtctctgccagcagccagtttcagccctgtcttgcaggtggccttcggagggacaggttgcagcccaggcccgcccccctccttcctggagtgtctcacagactcaggggacactggccctccaggccctgcttcccccaaggtttccatccatcgcctcttgattcttggtaatcgggagccgatggatgcaactcatctcggtttacactgagtgagacaggcgctgtgggcacagccaagtctgcgggactcagtcaggtgtgagcctggatggccccggacaaggaagcctgtcctcttgctgggaaatttccgttaagatcgggccacttcccctgcttcctaacggttgagtctgtttgctctgggccttttaagcccagcgtgatccctctgagtccctgcggtgcatttgcgccatctccacgcttcctgttgagccccagcccaggcttggtgcgggcagtgctgcactgcactctcctggttgcctcctgagcacctccacccgcttccccaccaggcgtggctgtgttttcacccccagtgtccatctggcacccttctcgattgccaggtagttacggtctgtgtgggcaacacctgagggacccaaccaaaccaaggtccaggacacacttccgggcaggggtaccgcctctggttagctgctcactccccagcccaaatcttccgctgatgacttctggggtcagaggccacctaagggtctagaaaacagtctcctccagttggctacctgcctacgttggggttacggcccaataaacccacagccaagctgaaaatcctaagtgtgcgtcttgcgcttccgacacagccagggcatcgctggatgcgcagaggcagggctggacacattctggtgcttgaggggttccagggaccacgagttgtttttccggtgctcctcacccttcgccctggagggtgggggaggccggacagcagtgaccaagctggagctgcaggtcttcatccctgtggcccagccctaaagcagccttggggacttaaatttcattttgcccagcaggtgcacctgggccaggaacacaccagcgcctccttgttcttcgcagggaagtggaatccaagcaggggcccagatgcaggcaggcatctcctgggaacaagagccccagaatccaccccggggccccacttccagggtggttgcctggggcgtctggtcagagccagaccagaactgagcaggagcttccgggcatctgtgtgtgggaagggagaggcaagtccttcctaaccgccttttttcccagttttcattcagtctggccccaagcaggttctttttttcttttctttttcttttttttttttttttttttgagatggagtctcgctctgtcgcccaggctggagtgcagtggcgcgatctcagctcactgcaacctctgcctcccggattcaagcgattctactgcctcagcttcctgagtaactgggattacaggcgtgagccaccgcgcccggctcccgaagccggttttctgttctcttgcagctgggccggggctgagccctcggtgggggcaggggttgcagacctgtggacgcagggcccacgccgcacacacgtggcccccgccaggtgactcacgagccagcgcctgcgcggcggggtggccaccgggtgcaggttcagggccaggggccgggcctcctggggattggcagggcgcccgccgcggtcccatgtgcctggggccggtccccgggcggtggccttcggccctgcgctccggcctggagaagggaggacgccaggggcccgggggagtggaggcggccacgcagcagccccggagcacccgcgcgtccgcaggccgggcccaccgcgctcggcgcccctcgcggccgctttaaggcgccgggcccgcctcaatcgcagggggcgtggcctagcggtcccgcccccggggcgcgcgcgcgcattggctgtgcggggtgcgggcgcgcgggcggcgctttgaaccgggcgcggggcgcggggcgcggggcgctgcggccggtacacgccggggtagggccggggtcgggttgtggtcgggccgggattgggctctcctgggccatggcagccgaggcgcgcgtgtcgcgctggtacttcggggggctggcctcctgcggggccgcctgctgcacgcacccgctggacctgctcaaggtgaggccggggcccgggacgcggggcggatgggaccctggcgccgccgagacgcctgcaaaggcagcagcccggccccacgcacccggggatcgccgcgcccggggctccctcctggagagcgcgaggaggcccccgacgcccggatggccgatcccgggtggccctccagtggtggccgccgagctcgaggcctgcagggcgcagccgcgctccccagcttcccagccggcttcccagttctcggcaggtggcgatccagccccagctctacactttaatacctggtgaccttgggggagtcacttggcctctctgagccacccacccccatacattcaagaacgctccttccgcctagttagaagttgtggggggagttctgtgaggtgcacaggtgttggcatctagagacgtgctggctgtagcatacccagggtgtgggccaagccgccccccacccaggggtgtttagcacaccgccggacgtgtccctgggcaagtggggtgacccgatgccccggctttgggctgcttccttcggagagctgcgtgggcactggaagcgatgttaggaccagcacacccccaggagagatgccaggagaccctgcacgcgtgtggtcctggccctatgaaagcgggcgtttctcagcacgagaagcagccaccgtttttttactttttttttttttttaatgcttatggggcaaaataagacagagctctccttgtttcccagggacagccaaggggcgttgttttctgaccgtgtcttgccacagagaacaaagaagaaagggcctgaggctttgcacagtctgcccagcaggccctgccctgtgaacctggctgtggtcactgggcagccgcctgtctaggggacctttattttagcagcctgtccaggggacttgtattccagcagcctttgaggggactggctttactaatgagcaacaatgctggtcgctgcgtgaaggccaggtgagcagatgtgggcgtcttggggcacctgagacctcactggtcctgggagaggccttcagagctcccaggccacaggcagccacggccagtgagatgcagccacagcgacaggaaggcgctggcatgggcagaagaagcgagcccctccttggcatcgggctcttcctttcctcctgggcgccgcacaggtgcccctcccccagggcctctcccacgttcatctgggtgttgaaggcgggacctgcgtgctgctgtcccttgtccggggtctgagccccactgccccttggccctccccaaccaggcgctctctggctgcagaacaccgcctgggggaggcgggactgccctctggcctgggagggcgggaggagccagctgctggcagcatatggcgctgtggtcagggtgtgctcctgaggactgctcaccaggcctctctgcctggccgtcggaaagatcttttaaagcttcttgagcactttgtcccatgtccctacagtccctaccgtcgcatctggccgggacgggggctgctacctgtgtggcccagtccctctgttctgctgggctcgcacaatgggaggcccctctctgtccccacccatctttgccgacccctgggcgtgcgttacggggccgcgcacgtgcaggtcacactgagcggcggaaggacttctttggggtcagtgctgggggtgggacccaggagctgggatcctgggccaggtgctggccttcctgtctggccctggccaatccccctactgccgggagctctcagctggccaggcgaggaggcagaggtcctgtgagtggtggaggccaacagaatgggaggttgtcgggctgacagcccccgagtgcctgcccacagctcctaggtgctttgcagaggaggccgctatgccctgccgccagccacaccgtccccttgtctgctgctgagctcctgctgcctttcaaggccttctatggctacctcctcagtctcccatggtcctgcaggctccctcgccgtttctgagcggccataaacgtttgtccctcttgagacgtggtgtggtggataaaaagtagggctctggggtctcctcgctgggcccaaatcctgatggcaccagcgggtgcgttacctctccatgcctcagtttcctcatctgcagaaggagaatggcgagcccctgcggccagtgcagccaatactcaggtggtacgcggggcgctcgcggggctcgcggacactctcagctccatgtccactggtgtggttgctgttggaaagcagtggtgtgagctggttccaggcacgggtgtggagtccccgggcagggccgtgggaggccttatcactgcctcctgcctcagtttccccctctctggatgaacctggcaccgatccctcggggtcgctgtggggtctgagagcactcactcccgcaggtgcatctgcagacgcagcaggaggtgaagctgcgcatgacgggcatggcgctgcgggtggtgcgtaccgacggcatcctggcactctacagcggcctgagcgcctcgctgtgcagacaggtgcgtggtgtgtgccagccttgggctcccagactggggctgagtcctgcagtggcatccaagctacttccgtccccttttcaagactttgtgcaaggaaggacccaccaggccgagagctggtgaccccagggtgcgcctcccatgggcacccacccagtttgcagggctgggcctgagaccgccacttactggtggggaagctgaggcccagggagtgagaaagcagggtgcagctctagatttgtgaactggctcagccgcatgctggcacagtggccttgggaaggcccctcagggtccctgtggcccctcgggctgagggggatccctggctgggccgggtggcgaggctgaggggtgtggggcgtgcccgtccctccaagccaggcccttctcccccagatgacctactccctgactcggttcgccatctacgagactgtgcgggaccgtgtggccaagggcagccaggggcctctccccttccacgagaaggtgttgctgggctccgtcagcggtgagctgccgggcgggagggggaggggcgcggggtggtcaggtcggccgaggacgccgtgtgtcagcacggctcatctctggggtttgtgtcaccgcaggtttagctggaggcttcgtggggacgcccgcagacttggtcaacgtcaggttggtgttcccccaccccacctgcaaggccaggggctttcttgtccccagacatgccagggcctgccagggctgcttgcagggtggggtcagcctggaataagccactgagaccctggtgtcctgggcataggagggtgggtgtccctgagccccggcgtgccctgtcctgtgggccccgctgaccagcgtgagctcccctgtgctgccagggctgcccatgcccctcggcccgcccgcccctcccgccacctgcttctgtttcaggatgcagaacgacgtgaagctgccccagggtcagcggcgcaagtgagtcatgggcggccttctcggggtggttgaggtgcaggaggctcgggcgggagcggacccctggctgctctgccgtgacccagctgaggctccagcaggccgaggtgcctgcacggtccatggagggtcctgacggctgttctggactcgggggtgtcactctgcgcccccaggacctttgggttcttcctgtggggagagccttgttggattgggggctgggcctgtttgcaccccagggtggtgagtgcggaggcgaacgccccaggcatggagagagcgcatgcaacagaaacgcccgaaggaggcgctgcctccctgcccagctcagggcagctgtgccctcctgccacggcctggggtctttccagggcccggggtccgctccaactgcagtgtgagccacttcccccgccccttccaaggacccctggggagttctggcttctagctgtgcacacagactgtgttcccccaggaccccgggggctggcgggcaggaggcctgcatgctaggagcggtgcccagccagggactctgttggaaacgatggaacctcctccctgagggccgggcggggcgggcgaggtggctgtgggacgtcaggaccagcttcatgttcccagggagagatcttcaggcccatgaggcctctgcttcctcgagaacccccggcctgcctcggggcctgggaggaccctctgtgggagccggtggtcagggggagtctcatgtggtcattctgtgtccccggcagctacgcccatgcgctggatggcctgtaccgcgtagctcgtgaaggtgaggggcaggtgctgtgcacaggcagggttctggggggcaggcagggtgggcagcgctgtagaagactgggcgctgagggatttgggccaggtgcctggcctcaccccttgcctcaccccttgcctcaccccttccttgtgcagagggtctcaggagactgttctcgggtgcaaccatggcatccagccgaggggccttagtcactgtgggccaggtaggcctcctgcgtggggtgggtgtgggcagtgcctgtgaccactgacctccatcttcagaggggccatagaacaaggcactgggcgccaaaaccctcctggggagccaccagctgtgaccttgtggggcagggtggggggcacgggtgggtcagggctgcagcctgtgaaggacctcgggcaggtgcctcccctgtctgggcctcacggacggacagacggagcaggtgcttggccattgccaggtggtgtcgcctggggccctgtgtgctttccccaagctggggtcccccctacagccctgaccgcccttgtgcccctgcagctgtcctgctacgaccaggccaagcagctggtccttagcaccgggtacctctctgacaacatcttcactcactttgtcgccagctttattgcagtaagtggccggcatggctagggtgggcgtccctgggccggccttgggcgctgagggcacccaggatggggcgagggctgggggaggcgggggccttgggcatctggcagtgccccctggggctcataagtggggtgccagggctttgggagctcatgggtcagcctggtgcccccgccagcatgttcctggcccgccctaggagtcaggtggaggttctggcacgtgggtgggattcggcgatggtgcctggcgtacctgacaggccgctggtgacgagccccctcctcagggtggatgtgccacgttcctgtgccagcccctggatgtgctgaagactcgcctgatgaactccaagggggagtatcaggtgagtggggccctgcctgtgcagttgggctgcacagcccagcgagtcccctcacctctccggggggtggacactcgcactggggacccggggaagggtgtccctcccttctagttgcctgtctctgcacagcacttgccttgggagagggttgtgcctttgaatgcctttgccttgtttttgtttttagagaagacttcttggcccggcgcagtggctcatgcctgtaaccccagcactttgggagcctgaggcaggcagactgcttgagtctaggagttcaagaccagcctgggcaacatactgaaaccctgtctctaccaaaattacaaaaattaggggccaggtgcggtggctcatgcctatcatcccagcactttgggaggtcgaggcaagcagatcacctgaggtcaggagttcaagaccagcctggccaacatggtgaaaccccctctctactaaaaatacaaaaaattggctgggtgtggtggcgtgcgcctgtaatcccagctactcgggaggctgaggcaggagaatcgcttgaacctgggaggcggaggttgcagtgagccgagatcacaccattgcaccccagcctgggccacaagagtgaaactgtctcaaaaaaacaaaacaaaacaaaattggtcaggcttggtggtgcatgcctgtagttccagctacacaggaggctgaggtgggataatcccttgagcccaggatgtccaggccacagtgagccgagattgcaccactgcattccagcctgggtgacagagtgagactgtcttaaaacatttcttttcggccaggcacggtggctcacgcctgtaatcccaacactttgggaggccaaggcgggcagatcacaagtcaggagttggagaccagcctgaccaacatggtgaaaccccgtctctactaaaaatgcaaaaaaattagctgggcctggtggcgcacgcctgtaatcccagctactcaggaggctgaggcaggagaattgcttgaattcaggaggcggaggttgcagtgagccgagattgcaccactgcactccagcctggatgacagagcgagactctgtcttaaaaaaacaaaaaacaaaaaaaaacacatttcttttctttcttttttttttcccctcattgcaacctccacctcctgggatcaagcgattctcctgcctcagcctcccaagtagctgggattacaggcgcccgccaccatgcccggctaatttttcatatttttagtagagacagggtttcaccatgtcggccaggctggtcttgaactcctgacctcaggtgatccgcttgcctcggcctcccaaagtgctgggattacaggcacgtgccaccactcctggctaatttttgtatttttagtagagacaaggtttcgccatgttcgccaggctggtcttgaactcctggcctgaagtgatctgccgcctcagcctcccaaagtgctgggattacaggtgtgagtcactgtgcccggccaaaaacatttctttcacagattaacagaggtggtgccgttcatggcagtctgtgcctcataggtgctctgggtctcctgtcttgggcccccgccaactccatggggcttccacgtttgcagagcccatagctctgtcccttttcttctccctgacgctgccgtgctgcatccctgattctcatggttctgttcacagccccctctgcccactggaccccgggctgcaccctcgggccctggttgtaccgcatgagcaggcagggtggccgttgacctggctggtgcctgcagacctgtggtcacctgttaccagccagcagccgccgctcacacccacacccacacccacaccccacattgagaatgcccaggccaccgtgcctggctggtgcctgggaggggattttcgttgccttttgggtgagaagcagcctttttgattgtttcactgcgttttctgcagggcgttttccactgcgccgtggagacagcgaagctcgggcctctggccttttacaaggtgcagtggtggcggcagtggcggcttgggcaatggggagcgggccccttcgggctctgtgtctctcattttccctgtctccctccagggcctcgtcccagctggcatccgcctcatcccccacaccgtgctcacttttgtgtttctggaacagctacgcaaaaactttggcatcaaagtgccatcctgaccagccgtgggaatggctgggctgccaggccagacacgctaggttcttccaaagagtcccaagcccagcacctgctcctggggccacgacctccctggccgtggccacccgtcctccgcagcaggcccctgctgtccccccacctgctggctgagctcctcctggcctcgtcccctctcagctgtagctgcaccacccccgctctggctaccaggctctcccggctgggcactgcgtggccttgcccctctcccgctggcagctcctcaggggaacaggggctaccagaggctgatttctcccctctcctgggccaggggaggggtattatccctgcctcctgcccccgatgcccaaagcagcatcttccagcactttccatcgaggacttgggtggcagagtgtgggtgcagcctggctgttgctcacccaagtgctagctctgcacttcgtgtctgctgagagcaaccagaccttccatgtcctcgggcagctgcaactccccgcgagaccccgcagctgggtgggatgaacaagcaacgcagaccacaagcgagtgcctgggagggagtggcccagggtggttctggagccattgtgggtgagggtcgagggccaccgaggtcccgcgcaccgctgcctgccctgcagtggctttaacagttagttttgccaaagcctctccactcaccagcaggcggtctctgtcttcagggattgtgcctgcgtccctcgggcacctgggcccccccgcttggctccctgggggaatggcccaggcgggccgcggttcctccttagggccttctccccgacaaggagtccgacggggcggatgctgcatcctctgcctccctggtcgctgggcttcaccccacctgggaagggcagtgtgctctgtgggggctgcaatcaataaatgccgggagctgccacatctgttcctgcctgcgctgcctgcccgctggctgccttgctgtccagaccagcaggaccccctgcaccccctaaggaggaccgggccaaggccttttggggaggagccagggtcctcgctgtgcatttggatgaaggaattggggaagtaggaggaaccaaaaccggtgtggggggaagggaacaagacggtgaggctggggttgagggtctcagacacaggatctggctctgtcattcagactggagtgcagtggcacgatcttggcttactaacctgggcctcctgggctcaaaccagtcttctacctcagccttccaagtagctggtgctatgggcgtgcaccatcatacctggctaatttttgtatgtttttgtagagttggggtctcacaatgttacccaggctggtcccaaacttctgagctcaggggatctgcccattttggcctcccaaagatgcccttttttttttttttaagacagggtcttactgtgtcactcaggctggagtgcagtggcgcaaacagcctgtagtcccagctacttggaaggctgcggtgggatcctttaagcctgcaagttcgaggctgcagggagctatgatcgcaccactgcactccagcctgggtgacagagcgagaccccatttcaaaaaaagaatgtaatggtgggccgggtgtgatctctcatacttgtaatcccagcactgtgggaggctgaggcaagatctcttgagcccaggaattcgagactagcctggacgatatggtgagatctccatctgtacagaaaatttaaaaattacctgagcgtcatggcatgcacctgtagtcccagctacttgggaggctgaggtgggaggatcacttgagcccaggagatttaggccacgatgagccatgattgcgccactgcactccagcctggagaacagagcaagaccctgtctcagaaaaaaaaaaaatctttgatatccttgaatatccattcagtgctcaagtttctctgactgccatgtgcattttgtgaagagctggttttgtttgaactggggaccagtgggagctctgaggtttgtacatggtacccagtgcccaggttggaaattcacacccagggagtggctgggtaggttcagggggaaggctgctgcttcctgagaaaccaggtggttcagaaaggcagctctagccagcaaatcccaaaatctgcagatggagggaccacattctcagagctgctttgatgggagccctggaggaagcggccatcatgacagggcaccggggccaccccagaggctggcatcacccccagcccctccctgcagtcagccccactgggacagtgccagtcaggggatgaaagtgcccagtctggtttggcagggccaggcctggcagtgggccaccacagggcagggtgcagagggtggggtgggagaggaggccagtgggcagggctccttacccaccctccacagaagccacagctcccca

SEQ ID NO: 555 - DNA, 10794 bp, Homo sapiens
  source 1..10794: mol_type = genomic DNA
tggggaagtaaggatcaggcccagagaactcgaaggaagagcattctcccctccaaggaggtgatcggagccccagtgggagagctgactgcatcccctcctcaggagagcattcctgctttgcagagatggacactaaagcacggaggctgtgacctggccagggtcccagggggaggagggcggggaggggcaggagctgggatctcaggcagccatcagggtgggtgggcccacaagaacccagacttgagaaaactggggtgtctctccaggaagtcagcgtggggctgtgcttccaagggccgtctgcccctccccagcctctggggccccctcctcagcatgggccgtgcctgcctccagccctggagcagggagtcctcgcccagcccaaggctgtgctgtctctgtgggcagagggttcctggcgttaaacagggtgggcacatgctgcacttggcccgcgggtcagggcggaggacagggttctgggctgtgggaaaggcggtgcccagattctcaatgaccgaggcagaggtgggaagggccctgggggcccagccgccctgaacctgagtgggtcttgccccaaagccccagaggccgcctgtctgcctctcccagggaaggatgagaaatgccctccagacctgcagagaaagggaggcacgttccccaccccccgccaggtgcattgaccacactgaaggtcacccgaaggtcacagcatgatgagggcgtctccagaagaggcccagctgctgccacctcccagggaagcccagccgtcccttcacccctgcagttctcggggggctcagctgctgggcatcaagtttgcaaagagcaggtggtctgcccccccaacctcgctatttgtggcacttacatcccggccgccgcctccctctcccgggatcaactgagccctggagaactggggggcccgcgcgcaaacccagtgaccttcaaggcccggagccgcctcctcgccccgcaggacgccgcgcccgccccgcccgccccgcccgccgggagccccccgccttacgcgtcctccggcctccccggggctgcgcgctcctccgcgggatgacggcggctgcgaacgcggaggagagctcgggagtttcccacaatgcactgctcccggcgcaggagggcggggagggggaggggcgaccgggccccgccccgccgggaaccgtgggatccgcaaacccagctccgccttagatccaggggtagaaacttagggtccgagagagcaactgcggggtccaagtcccatctgggactgccagaggcaggaggcgggtcccgctcagcatcccctctaggccagggtgccccttggtcggtgggtgacgggtcggtgggtgaggggtcggtgggtgggtgcgcaggcctagccctgcagtctgaagggagccagttatgggaagaggggactgccctcccccgcccccaaacagacccccagacagacagcagcatctacttagaatatttatttattctctgacatgacaagacacaaaaagttacaacttcttaaaactcttcaaaagaaaaaaatataattctgtaagcagcagcagcagcttccaaggttctgatgtgacgggaggggcagctcccaggagcaaccgtgaactgggggggtccaggcctgagccccaggtagtgtcgctgggaaggggcctctgtggagggccccggttttggggacacagcaccagcacatcagggtctgtcaccaacacgatcacatggccagggcggggcagggagagcttcggctcacagcagggatcgcccggtggcaggggggatggggcttctgaagtgtggtcaggggccttatgcccggaggcgggaaggatggggcttctgcagtgtacccaggggccttatgcagaggctgaaaaaggagggtgggccctgagaggacttgggggtgtggcagctcctggccctccctccagagcagggcaggcaccctcaggctccacactggtcccaatgcccgccctgctccctggccaatcccaggccagggtggaggactcaggagagaccaagctgggtaagttagttcctggacggggtcaacagagcctggggcacacacagcacacagagcgcctggccacggcgggaaggggggcagtccccagcagccccatccccaagggccaggccagatccccacaacacacacacgcatgcacacacacatacacacacacatgcacacagacctcacaatctgggccccagcctggggtgggagctgaggagcccaccagaaagtcccacagtgggtggcgggcttgccccaagagtcagacctcagggcaacccctcacttgggattcctggctcaacagagagggcaggagaccccagtcctcttgcaaggctggccagggaggcagagtcaagtcctgccaaggcgacaagagcggctggggaaggacggaagggctggagagccgcttgggtccagcagattcaataaataggtttgtgtggggtgcctgtgtgggccaggatggctgtggagactggagctggtggactgggggtatggtccagcctgcccggcccaggcccgggggcccccagcccagagaccagctctgtccctgggggtgttcaggccagggcaggattggggcaggggctagcttgaggaatgtaaagatttctgcattttctacataaatgagacattgatcccaacggtgcaggcagcaccccggggggcttgcgtgtgcaccacctatgtggaccctgcaccctgccccctgctgcccctgccgacgggagggctggggaggggtcttcccttgctccgtcctgggctagctgcctggctccagccccacaccggccctgcccagctggctggggtggagcgggtgctgggctcaggcctgggggtcctgcagcagccccagcagggactccgcgatgcccaggaagtagaccacctgtgcgatgccgaaaaggggcgcgatgaccagcgcgcggcagtaggcgcccttcaggaaggccgaggggccctcgtgccgcaggatcttcctgtggaggaaggacgaaagggtcagcccggtacgcaggcccccaggccccacccgccgtgggacctccccacctggcacagtccaggatcccagagtaggtgtcctcgttgacgcctcgctgaagtgactggagccgcgtcttcaccactgcaaggggcgctcgggtcagtgtgagcctggccaagggctcagtcccgccccatccccagccgggcgccatcccatgcactgaccatcacaggggttgacggccacagcggcggcactcccagccacacagccggccaggaaggacacgtagaaaggcgacttctcctcggacgccgggcggcccagctggttcaggttggcaaagagcgggaagtacaccacagagaaggggacatccctgtggggagggaggtggccgtggggacaggaggtggtggggtgggcaggccggcctcccccttccctccccccacctgccctgtgcctcctacctgagcagcgtggccccgagtcccttgtagagaccggcaatgccacggctccgcagcaggtcgcgggtcagctgggtggccgtgggccgaggggcagctggagcctccactgagggctgggcacccccctgggccgagagctggccctgggcagccaggatcttcctctgggcggctggggacaaagaggctgctgtctcctcttctgtgcgaactgggcaggggacacgctctggccctccctgcgtccccaccctcccctcgccctcacctcttcccgcacctctgccctctcctccccctccccccgccctcaccaatgcgccctgcatcctgcagctggatcttcagcatctccatgggcgtggtcacgatcacctggcaggtgccagccccacagcccgccagcatctctttaagcagggtcagcttctgcctgtggtaggggcggggccgcagtaagtgggaagagacaggtctacctgccaccctcggggctgcccaccatgcctgggcgcagaggatggtgggagccgtggaggcagatgcaggcctgtgggggtacagcccccagcctccgccactgcagcagcaggcagggaggagaccgatggacagacggccccacaggcaggggcctggggagggcagtggggctgtctgcgacaaaggaaaatgggaaattgggggtcaagtgccccaaaaaggggctgcccttgcagtccccctccagtgatgggggagctggtcagtgccctcaggccaagggctaccaagccagagccccactgatttgacatctgctttgctcccctggtcaggggaaaggagggagggtgccccacgaggtcaaagaagccccaagcaaggggctgaagacaggcagagcccccaggtgggacccagctggcagggtggacccatcctttatctgaagccaaagacccctcgagtgtctgccaggcagaaccctcacccgtccttagagagctgatgtcggaagaagtcgttggctgccagcttgatggccttctcgggggtgacgagggtcaagttcacagcagctcctgtggggcagggggtcagctggggggacatgctcggtggcctgagtggggaggcgcttggccaggacttgcctcctggctggcaaaaccctgtcccagtcactcctggccaccatctgttctctcacccacatttgggcctggtgtgtgccaggtggggcggggccaggcagggatggggcagcacctcaggctcaggctctcccatgcccactgcagctccatctgtctctgattctgggcagcatcttgctgctcagggcatgaggactgccccggagcccctgaggcctccctaggatacctctccctccctggaggacagatggtgcttgtgctggcagggggctggggccagaggtcacaggagtgtgtggtctggactgggccagagctcgggggaggctgtggagagcccccatctcagtgccgaaggctcagggctggagagcttctgccaaatctaggctctggattgtgtcctaagctgctttgcggtaatgccccttactccctcccatccccagccacaaacggggtccagcctggcccagaaggcagaggcagctgtggccaccagagaagagacagatgtaccatggcatcccacgcaccaggcactaagtgggggtggggagctgccacgggagaggctgagaactaccactcaccagagatccagtcccccctgcacaggcacagcccccacaaacacgtccacgctcacacaccaggcccaggctggccgccctgccctgcctcccccaccgctccctgccacgactcgcgggcgctacccaggcctgcccatatcgagcccagccgagccaaacctcaccccggtacatgccgaagtagccctcggagcggacggtcttgatgaggcagtcggacctgtggccaaggggacagggtgagccagggccagctggggccagccggaggccagggtccctggactgtctagggctgatagaagaggccaagtcctcagcccagccccgaccccagtcctgacccacgtgggatctcccctaggcccgcctgcctcccgtttcccttctgtcaaacagggtggggggcacaggagcagagcccccacctctcctgctgccacatgctgggcccactccccgcgaccgcccggcacactcacatgctcgtgtacacgcgctggccgttctgctggttctgcagcctggtcttggccaggtcgatgggaaacacgcaggtgacaccgatcagcccggcgatgccgccattgatgagcttggctggcaggctgtgtggacaggggtgtcaggaccggcttccttgaccatgggtcagggtgggggtgaggcacgcagccaggactggagtctgacctgatctgcttatcagccatttaactcgattgcacccaggtaggagccgcagaggtggacgccaggccaggcggggtggaggtggaggtggaggaggccttgagggagggtgggacccaggggggttgggtggtgctccaccttcaggggaatttccaggcgtcagcaaccgccacttctgtcctagaaggatgagggaatgggaatgagtgagggtggggccacccgaagagtaatcctcccccagcctccctctctcacgcagcccctcacccaccaccccagactgaagccgtcactgcgtcctgagggtgcagcagcgggaggcacctgccacccagtcccatgctcacccctgggaccacctggcttcctttcagtccccccctccccaccgccagcgtcttcccagccagcctcacacgccgctcacgctcggggctcacgtgcaccccagccagctccggcttttaaagggccaggcacctctgggggcagtgccaggggccggggccagggtgcctaccggagcacctcgacctggacagctgtggtgaccatcccccacatccttcagcacagagagagcagcagccggcacctgcccccttcgagctaggggctggggtcccgggcgccctaagaccccccgacctgggctcagctatcccaggtatagctctcctcccatggcagctccacctagggcctgcagagctcctccccacgatgcccacaccccccacagccagccccttgcccgccccttcctcccctccacccctcccaggagtttcactcatggacacacagaagccagtgatgggacccctggaagccttgggggtgggggatggctggccttctgaggccccctgtggctggcacccccatccactacagaggaggagaggacaggcctctcccactaagcagcaaggctggggagccacagccagcctcaggggcctcccatagggtcatggccataaaatcccagcttcgggggcctttcccccctccctgggccccccagaggccagctgtttcacccaccggcagcgccgttgcccagggccacgcggctggctcacacccacagatcctcagggactcgtaaccttcacctcggctttccagggctgggccatccaccaccgacccccgctccgccacctgcccgctggtcctgctctcactctgccccaggcactcactctggatggctcttccacactccagcccagcactcacacagaaggggaagctgccgggggaggaggcgaggggccgcagggattggccgtggggcggggtggggcgggcttgggtgggggggcactttctctttcactttgggcaagcagaggcttccggcagccttgagaggagagatgagcaggggtgggtctgactcaggctgacctggcacagcgaggccacccaccgacagggacctcagcgcgtggccaccacacccccagcacacatgtgttcctgtctgctgcctgtgggttgaaccctatagcatttcctggcctggatctgtctagggctggtactctgagaatgaggctttctccgggccagggtaccctgtatgtacctggacagggaatccggtgctgtggagcagagatgggctaacacccactcgtgtctgtgggatgtgtgtctgctaggggcagatgcatgtcagggaagcctcatgctgggccacaaaaaaggcctgctgtccacagggaagagctagctgggtgccagaggccactgttgccacccacaggccctgctcacctggcaggtccagagggcacacgagctggcatgcccagagccctctgccccaccacccgtcccactcagggcttcaccgtcagacctgcctttccctgcctcagccagtggtggtgacaagctgacctctgaacttctacctgatccctcctagccccccccacccctgccgccccactcttcgggtgcagactggccacagctctccgggctgcgctgggcccttcatctccactctagtccctcccaggggtgtaccctggccctccagggactgagcaacccccttcctcctgggagcctatctccagtctgggatgaggacacctgcatgataggggcaatcctggaagtcaggccgaccgaggtggggagcggccattcgtcccaagaagagaagcaggcccagagatcccagggcggagaggcaggcctgggcccgcacgtcacccagtgcagcggagaggagcttctgggtggagaatgatgacagtgaggggctctgcctggggaagaaccggcaggggttccctctgaacgccaaccccgcctttctctgccctcactcggcagttcccacccctggtttatgagacagctggccagggccctccccctgcactgatgttgctatagaaaccctgcagccccagccgggccccgggctgtgagccgtcactgtccccccttcatagtcaggtgaactgaggccacaggcaagccagggagacagcaggagagcagagaccaccccacaggaagataccgctgcttccgaatctgcaggggtaaaatcctccacccaagaagccgccaggctcctcctacccccaagaaaggcaatgggggtgaggctccgagtctggccggcggctccccattcaatctcccgctgtccccgtcctcttggggcggtgctttctatcctgctggctggagggtcccggaaggggactccaactgcgcgatgcctcggccagaggacaaaggagaagcgggttgggggccgctctctgcgctcggaggccggctcaggcccctgccctactgctggggctcagccgaccgctccgtcctccgcctggccaccgcgactccggccacgcacgtgtccacagatgtccggtgaactcccacgtgtgcgtcccacacgggtcggcctttcttccttgggctcgggccccggacacccaccctcggggacacgtatgtgcggggagcgcgcccggaaccgtcggggccgagcacggcgtctcacgccagagcagccgcggatcggagcatccgctggtccaggaccccccctcccgcccgccaggccacgttgttcgggcagctgtcacctccctcggccgccgcagcacctctcgcccccgcagcccggccgcgttcggatgggcgcagcagaagggagccgccgggcagacactcaccacgctcgccgccgccgccgcgctcgcctgcccgccccgcgctcggccagcacctaggcggggaggcgcgtccgctcggcgccgcgcgcgctccgccctcggcctcctccgggcttcggctccccctcctggccgtcgaggctactgcgcccagccaggccacagccacgcgcccacccgccccctggccgtgggttcccccgggcagggtggcagttctgcgcgcagaggccgggccgcgcgtccccaaggtcctttcttggtttccgggcctcaggcccctgcaggcacaaggacccgcggggcgcgggcaggtggcagagcgccggtggatgagggtgccctgggggaggcgtggcctccagggcagacacaggtgatccgtggaactgctgggccagcgcaatggagaagtggaggcacaaccccacccgccgaacagcgactttgtatccaaagcaccccacttggggctgggcgcagtggctcacacctgcaatcccagcacttttggaggccgaggcaggcggatcacttaaggtcaggagttcgagaccagcctggccaacatggtgaaaccccgtctactaaaaatacaaaaattagccagcgtggtggcaagtgccctagtcccagctacttgagagggtgacgcagaatcgcttgaacctgggaggcagaggttgcagtgagctgagatcatgccactgcactccagcctgggtgacagaaactccatttaaaaaaaaaaaaaaagtagcccatgtgggttactttgtagcacagctcctccctcccaggaagatgaggacccacaggaggccccaggcacagtgggagaggacaggaccaggatgtggggcacctgtgcacacaggcctccctccccgcaggggccaggcctctaccccaccaccctccgccctccaacggcttctccatccaacaaataaatcaagctctgaggtgaaagaaacagtgcagttttgttgctcacagggacccgtccccacacactggagagacttgaaggtgggggctctgcccatccactggggaatatctgggccagcctaaaagtctgtggggcctaggcctgggcaggctctgggggctgtggagccgaggagccaggcagagcggggtccttgggggccaagcccatgcgtcggatgctgtcctggtacttgcggcggccgagctccaagactgcgcgcacctcttcagccacgtcctgccggtcactctgctccagggcctgcaccaggagccccacagcccctggctgcccagcctggcgctcagcccaggagaagagcatgtgacggatctgctcatccagatcatccctgcaggcagaggatgggcgacagaggggtcctgtccacctgcccaggaccccccaccacactctgcctcggagtgtgggggagttcccggctcctggggccaggtgcggccagacctttcctttccagcctggtgtttgcccttcccccacctcccctggaagaaacttctgtcagaatcaggtgggccctccaggcagccag

SEQ ID NO: 556 - DNA, 53297 bp, Homo sapiens
  source 1..53297: mol_type = genomic DNA
atgcctctctgtgccggccaagggcagcccgctccagcaacagaaagcggggagggtggaataacctccagagaaggaaaagaaaactgggtcacggtaagatatttggggaaatccagccggaatgaaaatcccactctgagcaatttaacaaatggagttccaatccaaggggaacgtccagaaggagttttaccactgagcagtggttcatttggaactggttttaattgagaatgaaggacagaaatgaccaggactgaacccccttggcggggcacctcccaaatgctgagtggtgcccctggccccacagccccctcccagcctcctcccagccccctcccagcccctggccccgcaaccccctcccagcctcctcccggccccctcccagcccccaaggctcggcaggagtcaccactcagcctccagaagcttccctctagttaatttccagtcttcaggccaggtgcagtggctcaagtctgcaatcctagcactttggtaggctgaggcgggtggatcacaaggtcaggagttcgagaccagcctgaccaacatggtgaaacccagtctctactaaaaatacggaaaaaaaaattagccgggcgtggtggcgggcgcctgtagtcccagctactcgggaggctgaggcaggagaatggcgtgaacccgggaggcggagcttgcagtgagccgagatcacaccactgcactccagcctgggtgacagagcgagactccgtctcaaaagaaaaaaaatttccagtcttcaggctgcccagtgacatccttcaagggaagaaactataataaagagccaaaaggatatcaaaaggtgcaggaagacaccaccagaggctgaggccggccctccatgcagggacccttcgccaacacgggcctcccccagacccaggccctggtcctctgcccttcgtggcagggtttcgtggcagggttggggcgcaagctccccagaggacgagccaaagcagactcggatgctgtggacacagcagcacctcctctctcccgccaggtgagagggctgtggagcgtgtcctggtcacgaggcagcacgcccgtcagcctggccctgggggctggaccacctcctggcaccaggcggctctgcctgctcacagggtctctctggggctgtgctgcgtctagtgtccagtcactgcgacgctcaggtcatggcgccgttccctcatgacctctggcctctgctttacacatctggaatcctgagccggcctcaggctttcctttcagtcactcccccaggaccaacttcactaatcaggttatcagtggtgttttttactttttaaaaaaagccacaattggattttgaaaaacacagacaatggagggctgggccaaccatgaggagtgcaaagggcggcaccggccagtgcccctggacacccggcttgtctggcccctgctccctgtgcttcctggacaccaaacagcatccaccgaggctgggtgaaggcaaaagtgtttattcaagactttctaccacactgtgggaagcatcgataaacagtcataataattatcattctgagtcactgcaagcgtggggttggatgctggctctcacagtagcctgtgttgggaccatgagcagccatgcgcacctccacgcacggccgagctcaacccgaagaccacgcgtgctccctggcaggagcaggaggcctgaccacagacgcagcagctccccagcctgagcctgggagtgcaccagccagctcgcagcggaggccgtttctcctcacaggctggagtgagctcagagtctagaggtcagaggacctcagactaagagctgcaacagaacgacagcaagaacattctggaaacgatgccacagtgaatcttttatactgtcactcacacttggtgagggcctcagacatgaaaccctggggagaggcgagtgtgacctccagagtttggctgggatgcggctgagacagacctgctgctggccgaggagggcagtggctggcgtggccctcatggccagcaggtgctaggactcctctggaggcccaggcgcctgtctaagctgccggctgtggaccacctgcagagctccccccgcagcctggcggagctgggcatccagggcgccacggaggtcgttcacctggacatcaggcagggggttaaggccaatgatgaccccatccctcggggccagctgaccctctgcatgagggccaaggtcccgccgtcgcctccggaggtcggagccagcctgcagtttcaggtcccggttgggcttggcattgtccggcctctggccccccgggacagctcgtttgagccccagctctggctctggcctctgcctgggctcctggacagcagcgtcctccccgcctctcggctgctcgtgggacacaggcacatggtcccccccgcgggcctttctcatctccaggtgaccgccatggtccagccggtggccctgctgtccaccctgctcgccatcagagatgacccgcagttccggctggcgtaacacagcctggggctgtgcagctgctccttccgccccaccgggcaggtccgctgcaaggcccaggtctcggctcacttgcttgggcttcatgcgagggtcccccgtctctgctcctggccctgccacgagccagttggcttccttcagaatgctggtgccagtggctgccacctccttcccaggttttttcctgtcttgggaaccgccagtaacgtcctgactttgcccagggaattcctctgcgaggcgctcctctgggcccccggcttccctggcggggtctggcacgggcacctgctccgggcccttggggagctccttcacagtgccagctgccctgggggcggcatccttctggccatctctcagcttggcctgggctgcccgaggctctgtgtcagggccgccgtcaggagggccagcagggtctctgcccacaggcccctcagagtgctccagggagcgctggttaaggtcctgggatggagcagggcggcccccaggagctctgaggacagggtccaaaggcaggggaggcagattctccaccgtctccctggccttgccttcaggggcctcctggcctctgggcaccgctgccccgggctcttgatgcacctccactgcaaatgaagtcggtcatcaatttagccacagcactgtacacaggctgccagtggaggggctcagaagaaccagcaacaacagcattgggaaccaaaaccagactcacgctcaggtctagaggccaccgagcctcagacccagccgcatgaggacagcaggagaccccctgcctggccccaccccactccatccgccagcccggcctaccctgcctgggtttatcctcctcgtcctcctgcctctgctggtggatctccttgtgctgctcctcgatcaccgccagcagcttctcctgctggtccagcaagcgcttttgctgcacctgctgttctttgatcacctgaagcaggacggcgtggtccagcatctccgccctgccagcttctgggtttggaaagcacacagtcagagtgcccgggctgctcatgcaccgtgctgggccagggacggcgcggcccacagcaaggcaacgcacaggtcacctgcagggagtgtgcccgaacactggccactggtgacacccatcatgactgtgaccgtgaagcccggacagctcagtgatgcacgcaggcctgagggcccgggagaggctgcgccctgactgcccctggaagcccacccgggatggcctctcccgcacagccagccactgtgccgcatcagttctcccactggctgtgccccaggcgcacccggcaggaccccagcaagcctgctcgttgcccatggaagtgagtgtccagagcaacagtcaaaaggaatgtgccagaatgtcagagatggttatctgggctgggtggggttttgtttttgttttttccactttacacattcagttgttctaggacaagcacgtaagaaaataagcctgggcacggcggctcacgcctgtaatcccagcaatttgggaggcggaggcaggcagatcgcttgagcccaggagttagagaccagcctgggaaacatagcaagacccccatctccacaaaaacaaaaaaaacaaaaaaataaaaatgatcagggtatggtgagaggcgtctgtactcccagctactcggggggcagaggccagaggatcatttgagcccaggaggtcgaggctgcagtgagccgtgatcacaccactgcactccagcctgggcaacagagcaagaccctgtctcaaaaaagaaaaaaagaaaagaaaaactgtaagctatgttttgaaaagaatattggtacttctagaaagtttcctccgagatgagaattttaaaaacaaacaaaagctgtcttttttttttttttttttttttttgagacgggagtctcactctgtcacccaggctggagtgcagtggcgcgatctcagctcactgcaagctccgcctcccgggttcacgccattcttctgcctcagcctcccgagtagctgggactacagacgcccgccaccgcgcccggctaatgttttgtatttttagtagagatggggtttcaccgtgttagccaggatggtcttgatctcctgacctcgtgattcgcacacctcagcctcgcaaagtgctgggattacaggcatgagccaccgcacccggccaaaagctgtcttctaaggggagcatgggagctggagcgtcagtgaggcccccgccagccatcctaaccaccgctcctgaacaccatccactgtggaaattctgggcaggtcctgcgtgatggggagccccagtgcaccccgtgttaagagctggtgcctgcagcaagggccagaggacaggcctgcccgggttacggctggcacacacttggtgcaggagcacccggtctgactcgcttcaacactggccagttatttgccgcaagcggctgtgacttatgtcatttttacaagatgttttcaaattattataggaagctttgaaaaatgatgggttagggctgtgaggcataaaagttcaatccaggagcgagaaggatgttttgtgagtggtgagagcaaatatctcagggacggccctgcatgccaggcatagactgacgtgccggcccagcctccccagtggtgacaccatgaccagccagagaagtgcagggtcagcattctcccaggaacgcagccctgggcctcgcccagacccctggatgtgggggacagggctggctccaaggagatcagggccatggggccggccctcaagcagcagcccctgctccctgctagcaccccgggccagacgcctgcctgcagggaaaggccatgacgggcagagcaggtctcccgcacacctcctttcacaggaggaagtgcaggtggcagaccagccacctcggccgtgggccacgtgctcgccctgggtgctgcggggctcaaccacggaatgtcaatggtacaaggacgagatcccatgtgctggtgacacctccccatactccagggcagggttccgaaagagcaggcaccatggcctcacttgctcctcaaaggactagccctgggcctggtgctgggaagaggaggaaagaggagacagaagggaggagggggagggggaggagggagggagaaagaggaggagggagaaggaaggtgggggaagaggaggagggaggaggaggaaggagggaagaggaggaaggagggaagaggaggaaggagggaagaggaggaaggagggaagaggaggaaggagggaagaggaggaggagggagggaagaggagcaggagggagggaagaggaggatgaaggagggagggaagaggagggagaaggagggagggagaaggagggagggaagaggagggaggagggaagaggagggaggagagaagaggagggagaaggagggaggagggaagaggagggaggaaggaagaggaagaggaggaaaaaagagggggaggggggaaggagccatgccacgtccagccagaagccacgtgggacacatgtgaagcaccgtggaggagacaggctgttcctacagccagagcccaccaagaccacggggactgggctgcagaaggcacgaagccacccacctgttgagacccatgcagatctgtcaaggtggcccatgaggcagcagtgcaggcagcgtccccccttggctggtgccctaagcagcctgcactcagacgcttgcagagaccagctgccctctgatgacaggcaaggccacagcagggctgagaaggaccacggcatttgtaacacaagggagcagagtgggcatcgggaccctgcctgaggggctgtggctgagcctgggtgcgtgcgcaggtctggggcctgacacgtgtccccatgcagggctgtccctggggcaggtgtgccaccgaggggctgcgctcaggtctgtggcccgccagacaggctcttgacttcagcacactcctttgggttcgtacctgctactatctttttaatttcagctgctcgtcccgttgagaggcatacggaagaaaggcagaataggaaaccgtgaaaagtctttttcagaaagaagaaaatcaaaagaatcaaacaggttcaggtaacagagcataggaattggaaccaacaaacatggccagactaaaaccggagacaaaaccccacatgcccgaactcctgaagtggctcagagctccgggagcccagggggcgccttttggctctgccttccgcgctgcaggtgcaaggagggcgagctgcacctggagaagccaggccgcagcgactgggacgtggctgctgcacctgccctccctcggaccggctgtcctgaggccacagggcaagatgcgcgggcaggaagcgtgtgtcttacgaacatcctgggaggtgcccgtgccagggctggcccggagctcccacacctgctcccaggggcttggcacaggaggctggagcggctgtgccctgcgacccccacacagatccctggaacagaccctctcaatgctgaggcacacgtggaccccgcatggggcagggttgaccatcttgagagaaggcttggacactgccaccaaatgcacgtgacttttggtgagcgggggcccagccacacaccctcagagggcgggtggacccctagcctgggagaggacatggcacagaagcctgtccccagcaggctcacagacggggctgctgctacccaactgcatgaggccacaaggaggggtcgcaaaaagccaacagctgagacccaaggggcgagaagtttggaggaggattcagagcaagttttattctcaggagagcaaaggcgtaaggagctttcctggagggacaggtgacagatccctgtagatgaacacagccgagctccgaggcccgagggtgtgggagcagtgctctgggccagggctatgctaggaccagggcgggcacagccacccccaaactgggtccccttggggcacagccttaaaataaacctccacatctgggtgcaggcacgcccacacctggctggctttaaatactccgagtgttaaaactgttaacaaacctgctttaaagacgaaatggtaatcacaagccaagtgacaatgccgcaggtgttttaaaggggagcaagggagataaaacggtaatcacaagccatgtgacgatgccgcaggtgtttaaaggggagtaaggcagataaaaggttcccagaaagcaagctgctgatgggaagggagcagaaagctctccgaggggtctgctcagcaggcggctggaaagagaaggggggcctggcagggctcccgaggatgacctgggcatcaccccagggctgggggagggggctgccgctccctgggcctgaggcaggcggctgtagggcggaggccttaccctccagctggctggccgcctggtttccacccgctcgctccacgtccctctgctcgcgaggctcgggcggcagcccaggccctggagccggcttctccgctgggaggggaggcttcccacctgcacacacggtgaagactcagaaggttttgcaggaaagtcaagggagggtttggggggttgggggacagaaggcaagggcgggacaaaaggaagtggcagatgtttctaaagtgacacccccgtcagcacagtttatattcaacctgatgattactagcgaagcaataaaaaaatatttaacaacctcataggcttgtggcaatgagccaatggtaactgccttcgcaattaaaatgcaagaactgtcctaagcagctcttagacgggcacttaacaacgtgttacctgtcaggcgccccccgcgccgccccccgtgtgcgcccagacacacgagcacagcgcggcacctgacatttagtggtctggcaaacaactgtgtgacagatattacagtagctgtcagccaccagcctcttcctgtccccaccagctgccggggcccgctccatttgcatgctaatctggtgcagggagagagactggggactgagggaggaaccatcgattctgctgcccctgcccagcctccccagcccaagaggggagtgtcttccgacacgagcccaggctgacacccaccgtggtcgctgtcctctgcgggctgccctgtgtccccggcggcgttgcctggcggcggtccccccttggccttttcccctccacccaccgccaggccgttctgctgctcagacagcactgcctggggccgaggatgcaggcccctgtctcctggccccaggtcctcctttgcaggctggacagctggctgaccatctgcttctggaactttctggggatcttcaggaagatcacccgcctcctccaaggcctgggcctgtccaggcctcttcccaacctctccctgctccggctcttgtttctctctttctgagtcgggcagaggcggcgccatctggccctggacccctggagcctttccgcccgcgtgtctggatggaggtttgttctcttctggcacctctcggtcttggccttcatctaccaccaccttgtcgtgaggaacaggaggctcgtggcggtgggcctcgcccacaggcacagcaatccctgcaagggcacgggggacagatggggtcaggctgaggcccctccttcccttcccagggaattagaactgggttcttccctgggttctggctcccaacagtgtgacacaggccaacagataccacctcccctgccggcctccctgctgcctggccaagcacagctgatgctaaagttcaacaggggcagctgcaaacaagttgctctgggaggggcaggacattcatctgaattgaaagacagagaaaacaaaaaggaccagaacttaggctgggctgaagggaaaaagatacacacagccctgagagccaccccgcagggtgtccagcctgcaaaggaggacccggggccgcccttccccatccgcacccccagccagtgcccagcaccttgcccagggcgatcgagctgtgcctcctccggtgcctccttgccatcttcccgtccaggcacatccacgggccccttgatctgggcctgctccagctcctctctctccttcggcagcttcggcttctcccggccatcctcagccacggccacaaccggatcctgggctgggagcagggcacagttagggaactgcactgccaagcagctccaggagcggggcagctctccctggactgttaccatattttccagccaaatggcagagtcaaagcagtttctttttcctgttcgatcattagcagctaagtagcacagaaaactgtcatttttcatgtgtattcacaacaaaaatatgtcaaaatgcgatttacacctaactgggggcagggagaactagactccatgtaatactcagtcattaccaccagatggcggcacgagcccaccgacccactctcccacagtcccctccattaccatcacctccatcatcaccgtcatcaccgtcacctccaccaccaccaccaccatcaccgctatcatcaccatcatctccatccctaccaccatcaacatcaccatcatcaccatcatctccatccctaccaccaacatcaccatcatcaccatcaccatcaccatcatcaccatctccatccctaccaccatcaccatcatcatcaccgtcaccatcatcaccatctccatccctaccaccatcaccatcatcatcaccgtcaccatcatcaccatcaccgctatcatcaccaccatctccatccctaccaccatcaccatcatcatcaccatcaccactaccatcaccaccatcactgccaaccctaccatcattgccatcacctccattatcgtcatcaccaccaccatctccatccccaccaccatcgctgcatcattgccaccacctccataatcatcacctacatcaccgtcacctccaccgtcactgccatcacctccatcatcgtcgtcacctccgtcaccaccaccaccaccgccatcaccacctccctgtcccagcaaggccatatgtccactgagacaggcgctgcagccgagggggactcaggtgaagctgtctgaggaagaattcacacagagtccagttcagagcagcagatggggcctcaccagctcccataggagaagaaaatggggacaattagcttagctttctaccagccttctaagagcagcctgatatgttagtctagggaaacagacagttacactgttgtcagtttggagttgagagtcctagacaaactgtagagggaaggtaccaccctactgggtaataaactagttaacagaaagcagacgctaggctctacagtttagttaaagtaacaaattcaacttttttttaagatggactcctgctgtgtcgcccaggctggagtgcagtggcacaatttcggctcactgcaacctctgcctcccaggttcaagcaattttcatgcctcagcctcctgtagctggaattacaggaacctgccacaatgcctggctgatttttgtatctttagtagagacagggtttcaccacgttggccaggctggtctcaaactcctgacctcaagtgatccacccgcctcattctcccaaagtgctgggattacatgcgtgagccaccgcgcctggcccaagtgaccaattctataagcgtatggccacccgcctgagcaggtgaaaacatactggtctccatcacacgattaggcttcggcagaggccccatgcggaaacaagccataactgtcaatcaagagggcctgtccaatggattactaagtgaagaaagggaggctggggaggggaagggaaaatatagcaaaacaaaggaaatctccgttgtcataggacaagttgcctcagagcagtcattttctcagcaggagcaaaattcagttcctcaggccgtgaatgaccagtctggggctccagggggagctctgtgtgggtgcaggagccgcgggacgggaagtgagcacggtgagccgggagctgccccagaggtccctttggagaacctcccgggaacgccacgcctctcagcgttctgcaagtgttgctggattgcacgggcacctgcaggaaggctgtgcgagtgtcctggctccccgccgcctgcagcagctgaccagccaagggctgcactcacagccttcatgcccggcgctctgcagctgtctgcgggcaatgcacacagccttctccacaacggagcccatctttgcgtcagggacagtttgccggcagtgcctcttggctgcagtaaaactaacacaaaacttcaaaatcagcaactgaaaaacgtccgagtgctgccagccgcttccactctcaacatgaacacaggttgcgcaaagacagaaaggggccctgtatggggagtgcccccgccagctcacgactgagctcctcgggagggaggagatctctggcatccgaatttcttctcctagaaggccagcaacacacccggctaagccacagtagaggcggccacggccaagggggatggctccacgcacgcccccaggaacacccagcagagggtgctgccgcagggcaaccatcctccctcatttggcttcaaaaatcgcctccaggccaggcatgatggctcactccggtaatcccagcactttgagaggccgaggcaggaggatcacttgaggtcaggagttcaacaccatcctggcaaaaccctgtctcaacaaaaatacaaaattagccgggtgtggtgccgcgcctgtattctcggctactcagaggctgaggtgggagaattgcttgaacttgggaggtggaggctgtagtgagccaatatcgtgccactgcactccagcctgggcgacagagcgagactccatctcaaaaaaaaaatcatctccagtcacaagaaaccacgacccgtgaccatcattggcacgtggtgccaggaatgctgtgtttatgctgtcccagcggctcctcactgccaggtgctgacgcaggttcccagctcctggcacccacaaaaacacacaccttcctaacaagtgacagaggccacaactcagccacggcggaggcggatccctcagactttcctccctgctgtctagtcgggcatggaggccccaaggctgccaaggccacagctcagggctcggtctttggagtcagacatgctcggggacttggaggtggtgacctggaggggaaggggcaacatctaatgcatccccaaccccacattcaaggctggcgtccaccccagaccggaggccagcacggacgggcggggaggccagcgacgctgccgtccggaccccaagagtcggcaaggtggctctgcgggctgccggcttggacccgccatggctccctctgtgcactttgtgatcagtaaaggtggagacagtcacatcagacggcccccagacgaagtgacttttaaacacactcccggcatcccacggacggagtgcctcatccactcaagtgccgccccaagttcaggaggaggctcgggatcccagggcgccacactcgcaagaggtgagaacaatggccgctgacgtgacttcaaagctagtccctgcttttaggcaacttttctaagagctgatttctgactttcccttgatgctgccatgagaaagtattactcatgaagggcttggctttacagcccaatcttgagcacacagctgaccaatgacctcatggtctgatctttgcgaatgtgagggggaatcccaggctatctggctcctggtacccgggtgtctgggctggcaacacagccaggccctggtacagcctccggcaggcggaacctcctcaccactgcttttgcctccgccgtggctggcaccactgctgtctcctgggaggcgggagaggctcccagttccttccacagagcaccgaatggtccgtgagaaacagggccacatgcttctcccttctctcctctgactgtggggacaacgccaccctgctggagctctcctgcatgccctactgagaaagttttctttttaagagacagggtcccactctgtcacccaggccggagtgcagtggtgccatctcggctcactgcagccctgaccttccaggctcaagcgatcctcccacctcagcatccagccaccatacccagctaatttctgtatttttagtagagacagggtttcaccatgttggctgggctggtctcaaactcctgacctcaggtgatcctcctgccctggcctcccacagtgctgagattccaggtgtgagctgctgtaccggcccggagaaggcttctgatagctcctttgctgtgtcccccgcgcctctcctcctcttataattttgtgtcatgtttctgttgctgtcctgagatggcagggagctgattccattgtctgagatcaccccgccatccgtgcaggacctggccgaattccgaagggccctgcctcctgcagcctctggcctgtgttgagccacgtgacctgcctccacgcatgggggctgtgtgtccccgcttgggcctgagcacacagaactgtggccatctctgcccccgcaccaacacacacgacccgtcgacacccagcagaccctccttctgtcccacatcaccgcattctgggtcccttctcagccaggcccctgcctcattttcccacggagcggaagtgcagctgtgcctgccccgctgggggagcggggacgagggtgcccgaggggtgcgggccctgctgtgctgccccatgcagcaagggaggggcgtgcaggcaccgggaggacaggggacctgcagctccaagaaaggaacagatgtcacaaaacccgaacccagccctagccttcagggtgctagagagagcaggtacgaacggcccgactcccagctttcaaggtaactgtcttcatgagcctttgcagggactcagccatgctcacaaaggcctgtgaagccgtgcatggggccccggctgtgcgcgtctaaccacgacacatgacatctgcatgaggatgggattcacggccacagcccagggccacgcaggactctcacccagtcagcaggtaccatctttggcctctgcagcatcaaagagaccaataaaactccgctcagcagtctgacagggagcgcacatcggtgcaggaccctcgaccccagctcagcctcagcccggcagcccatctatcacgggggagccgggggctggaaaatcagagacacgctaaaaacaagcagcatgtggttctgagaggggccatgtgttttgttacagcctcgtggaagaaacagaaaccagatgtggcctcggagggcaccaggtgagccggaggcccacggcccgcacaagcctcatgacgggatacagctgcttgcaccggccgcaggcagaggcggcgcagtgctaaggggacggggagcctcctgctggctggcaccgagaagtccactccccggcagcctgctggacgagggcgacacccctcactgcccagggctagggtctcagcacactggactctagctcccaggctaccacaatcccaccgacagctcccatgtcagcgcccagtctagcccagaggcctggacagcagtaagtggccctgctcaggcaggaccgagcctggggcaccagctgaggtgggagcaaaacacccacctccctctccaggtggacgtttttccagtccgaattaccaaatccaacgcaaggcagctccaccggctgcttcggaacactcccagtttccttctctggtgacccctactgtccccaagcacagccccgccagctgcacggaacccagaaggcagggctcccctgcccaccttcgccatccgggaacagtcatccttggcaaatatgagcacagcggatccaggaagaccctcggagagtgtccctcggggcagtttgtatgaggtgacaacgctgggaaggagctttccaggcacaggagtgcggagctcagaacagagatgacaacaagccccagggtcacggctgagatggcgtccccacgcactcagccgacgccaggggctcccttcaacggacctctcctcctgtctgttacagaagtggaggcccctcctggaggcggaagtcactggccagcacctccatagccgcctgagacccccagccagagccggcactgctcactggggctcctcgggtggtgggcagatgacgcccagcgaatctgactgagccggggcctctgcagaggggtgtgttggatatggtcggcacacgggcagtgtggatgcataaacccagctgtcgtcagaggcagaagaccccagcgtgaaggtcatcgtggacagcacctacctgcccatccctgcctggtgccactcagagctcgtgggagggctggcctggggaggtctgctgcctgcagggccgccttgtgtggcactccctctctaggcctgggagggtcagggaggcagtagccacccaggccacggagctgcggctgcacctggaaagccacactcaggaaacacgcatctctgcaccccgggctgtgccacagacggaggcgtcagggttatggggcgctgcggccgggactctgccacagacggagggtcgaggttacagggcgccacggggcccctcctgaagcggcctgcagctagctgcctgagggctcatggtcctaactccacccacggtcctggtgaacaaataataaataacctgaagcagcaaaccaaactgaggcctgatcgccgaccctgtccaggagaaaactggagaaacttacatcctcaaatgaataacagcacgtgagcaacactcagaaacgtacaccccacctagcccaccgagtggcaggcatccaggccagcggccactcctgtcccatgttccctgcatacaggtggccactcctgtcccatgttccctgcacacaggcagccatgccacagccagccatggtgcacagagcatgttcacaggggaggctggtggccccaccctgctggctgcacccacacaggacagaggccactgagcaggtaagcacaatcctcggaccagacccaggagacacccagtgggcacttgccctgagaaggctcagagagccagggtgggcatacctgagagccgcgctgcctccaccttcatcaaaccctcggcctctccaagccggccgccaggggcttcctctgccaagtcctcggggacctcctcgctcacagacagtgtggtgacagtgctcaccaccaggacgcccaggccgacccacagcaccacctgaggagacaaagaccccaggggcgggagtcacagctggcccccgcccctgcccagggtataaaactggcctggcagagaggctcagggacggggtgaggcacgaggagagtggacatgacaaagtcccccgaggacgggacaggcgtgcagtcggccctgcctgaggacaggtgtccactcccagggagacgggcccacctgcccgcgaagctcccgaccactgggagagggctgagccctgatgcgccgctgccagagcatggcaggactcctggcatccagcctgtggctgacgtgccctccatgccagctggggtcatgggccaatcctgtcagagctatgccagccattcaggacggagcgggagggacagcggcttccagaagctgaaggtacgtgacgagccttaggggagcagaggctgagcactgcccaacctgcctgggagaggaacaggaacctccaggcagacttgagcgtccccgtccatgctgtccgcaaagcgagtgctcctgcacaacccgcaaggctggccccgtgcagcagacgcaggcccgtgcgcatgaagggcttgccccaaagtcatcacagctggcaccatgcatgggcacgggggacagaaatggccttcgcctctccttagctgtggtgtggtgcccactggggtcaccctgtgagctgacctccaggcactctttgccgaaggctctccctgtgtgacctagtcctccctccttcccccgctccccggccaatcgtaagcatcacacgtgccgcctcggtgactctgacaaactgtacactgcttggcccggctcctgccaccccggctcccgccaccccggctcctgccacccctgctatgttagcgaacacactgggcccactcctccccagtcattcacggggccacggcagcgggtgctggtttctgcctggcctggcccagcacaagctgctctccccagggaagcgctaactcccggttgggcagagcctgtgtgcactggcaaggcggacttctgtagagccaaggggctgtgccattccctctgtggtctcagagccagaactcaaaatccttttctgaaaggtatgtcgattcttaaagaaaatcagttcagaagaactggtgagacctccctggtccaatacaattagagaagaggtctccccagagggaaggactcgtgctctccgaagctggtggcagctgaaaaagacaacctagtggagagcccgcttcctctacttccttctctgccacccggaaacattgggctggtgtcggcatctccggacgccaggtgctgctgaggctctggggtcagtgggctccgccgaagggagcccggccgcaatgtgcctcggggcttgtaggatgcccagggagcccaaagcccctctggcagtaaccacagctggccggagcaagcggtgacggcaggcctgccccaggtgcacacggggacactgtctgatgtacgttccggaggtccggacggggcctgcaggctcgacggcccacagagctctgccccgccctggccccgaatgttctcctccatttgtagatgccccttcagccatgttacatcttccttgcagtgaagggaagagtcccagggcagtggtggtgtctggaaggtgaccaaagcagtcttaagataataaaaagaggaagaaaccggaactctcgcgaggctgcccgatctgtgtagggagcaggtgtggaacggcccgcccagtcagtgggtggtgtggatggccgtggcttagaggcctgaggccggaaggaaaggccttgcctcttacagcccttgtgacccctcctacgccagagctgccccgggacctccatcttcaaggccctgccctcccatcgaggcctctgccagccagcacagggcagagaccaggctcgggctacctggggtaaagggtccggatggaaattcaacccgacccaccaggaagctgcctggacaggagactgtgttgtctggaagccctgggaagctcctctcagtgtgggaatcctgccccgcaaggcagcataccctcgcctcgtcccgggtggatttctctaactgggcgtgtgctaagtgcatctcacatttctccagctgagggtggacagaaatgaccttgcagagaagctacaaaaaaaaatttatctccctacttggacttcccataacaccaacacgctaattacgggatcttggtgagagtacctaaatgggaagggaaagcacctttgccaccggctggtcaggacaggagactccccaggtgggaatcccaggagcccagagtttgccatccgccagggagcacagcaagacccggcccctccaggcctcaaacgctttagacccaaagataaagacattggttggtcattttatgtcaggttatttttaacggggacctcatctaaaacatccatggagactgatgggccaaagaaacatctccatgactataatgatttatttcaacccccaactttctgagcttaaaaatcacatgcaaaatcaaaaccatgaactcactccatgctgggagacagcaagctttccaggaagacccaggaccgacgagccttggaaaggacacaagcgcagggaggagaacacgctcgaccgaggccctgcagagcgccctgagtgcgaagctgatcggcaggggaggggggctcccgaacggctgcacagggacccccaccacctgccacctcccagggcagtacctggggaccgaactcagccccaagtccaagaacatctcgaaacacactgtggagaagtggaggcttgaggtcaccgtacacagggagcctgcatggaatctttgggctgggacaagggcgggacaattccagacacgcgggtccaggaagcagacccaaccccgcccgctgccacgtacacacctgctgccacctcctaccccaaggcgtccccatcaggagagccatccctgggcccccacaatgcaccagacagcacattactgccggcgaaacgccactcgggacaagcccccggcgtgagggcagcagagtagccctgaacactgagatggtgacgccccgggcgcacccctgccggctggaaggctccatcccctctttgctgagacccctcgtcctggctcgctgactttcaggctgtcaggctctgcggggcacttgccggtgaccactgccttgagcacaagcagccgctggcccggccgacaatgccacagtccacatgcccaggctttcctttaagacacaccctggcagagacaccagcactgcccagcttgaggggacccgtgggaacgaggaggccgcatgggcacttgtgatagcgccttgggtccatgcctcatccatgagggggcagcgcatgcagtgaccaaatcccagtctgtggctgccacgtgccaggagtgtgtgtgagcacctttcacttctgtgccagagccagggcgggaacacggacccagcagcagcagcgggcactgggcatgtggaagcagcacagcattcactgaagtccccaaggcagctgtgagaactctgccggggactgggccacagacaccacggagtggacgccgcagtccccgaggacagggtgggtgccaggctcccccgtgcttgtcctgccactggagtgtgggaatccaaccacgggacgtgtgacatagacaagggaacggtcagtagttccctcggaatcccgaataagggcgtaagtggagttctgcacagacgggatggccgggaacttggggggcctgtggggagcacagcggctgcccagcctcagtggcgggggaagcccacggagccccagcccagcctccagccctgtacttccagcacagcttcctgcacagcctaagaacttcctttgaggacgcggtcattcaacggaccagcgtgccagacacctggtttcagagcaccccgtgactttcatttcggcagttatcagatcaatacagccgcagaaccggccagcaggaggaatgcaagcccactccagacgtctcacctgagcttggaaaatccaggggcctgaccaggggccgcgcactgcccggatcgtagcaccctcccccggagaagtgatcagggcctccagacacacaaggcgtcgctgactcaaatgcagagagaagcaccaggggcaggggagaaaacactcactttcactccacacatgtagaaagtgcacaagtccacgctctgcacttcagccataaaaagcacagctggaggtgggggctctggctgctctgcaccacgcgcctcgatttgggtctcagggcagcccagctggcatccaggcaccacccagcaaggccccgagcctcagcaggccttgggggtcctctctggttacaagcagatgccccgctggtggctcgtgtctgagagtcgcagtgtgcatttcactgcatcttccaagagcaggggccagctttcaggcctttcagggactgctgccctctgggcgcacccgtgaggcagcctcccgcgccccagggatctgtcctctgagtggccctcaggcaccttctaagccacctgctgctacactccctcatggttccagggcagcaggaccaaagccccagcctcactcaggactggagagaccctcaactttctgactttcaaaataaagaaccaaacagggcgggcgtggtggctcacacctataatcccagcactttgggaggccaaggcgagtggatcacctgaggtcaggagtgttcaagaccagcctggccaacatggtgaaaccgtgtctctaccaaaaatacaaaaaattagccaggtgtggtggcgcacgcctgtaatcccagctactcgggaggctgaggctggacaatcacttgaacccaggaggcggagcttgcagtgagctgagatcacaccactgcaccccagcctgggcgacagagcgagactctgtctcaaaaaataaaaaaagaacaaaacacttggtggcaaatgtatcttttcgattccctcagggccgacctattttcctgtcccctggttgatcttctgaggacgagctggaacattccttctttttcacgtctttctccagcacagccttgattcacctactacacaggtgtccccacttccctgtccaccccagcatatcaccagttgtggctcttcctgaggtccctgggctgggtacaggcaccatatcgctgagagtactcagacaggccaaggcacagatccaggcctgtgcccctccgtgggcgcagccggagcccctgggacagtggccacgccgagatgtggcgccacaggcccagggtacggccttgcggtgctgacatctccgtacctaaggaaacagggcatgctgagcggatggcacacggtggtccgctggccccacgacctactgcggagccgtaggagcgctggggacaggacgcaccagacccaagtcagagggaaaaagaaacctctccgtctcctccacgcacagccaaactgcggtgaatgtgattcagtgcgctttctagcttccaaaagacatggcaaagcaggcacagagagatgcttctttcacccaattctgtgtgtgtctacacatgtctacacaccaagtcaaaagccgacactgggctaacgggtaaacactagaagccatcccagagtcagtgacgcgccagccactcacaccagcagcgccgtggccacaggtgtgtgacgccacacacgggcaagagaggaggaagcgctgcagcaattggaaagagggaggcgacatcatcattagctgcaggtgaaaagccaagagatccagcaggagtacagtaaggtgaacgggcgaaaatgtcacctatgaaatctctaacttccctttacacaaacagccacttagaaaatccagggggagggccggacgcggtggctcacgcctgtaatcccagcactttgggaggccgaggcgggcggatcatgaggtcaggagatcgagaccatcctggctaacatagtgaaaccccgtctctactaaaaatacaaaaaattagccgggcatggttgcaggcacctgtagtcccagctattcaagagactgaggcaggagaatggcgtgaacccaggaggaggggcttgcagtgagcagagatcgtgccactgcactccagcctgggcgacagagtgagactccatctcaaaaaaaaaaaaaagaaaaagaaaaaaaaagaaaatccagcgggaaaagagatcccaggatagcatgcagtgcagccaacagccacctgggaaacagatgggaacgaaggacctacagtgaggtctggataaaccaaatgcagtgccttcctgctgagcaggagagttcgcaaggacatctgcacatcagctacagtgtaaagacggcaattcccaagttaatctatagtttcaataagcccagttagaccaaaaaataaaaagcaggactaattttttgttagagtcagatgggctgattccaacattcatacagaaaataaaacaaagactatgcagaaaatgtattattaacagccaagaggcgagatgagaattaaagtgttccaagagcaacaagtcacaactccgtgagtgttaccagggtgtggcaactaacacgcaactaacatgcaactaacatgcaactaacacagtacggaagggcagaccagccaataaagtaaaacacaggtcccaagttaggcccgaatacatataagaatttaatctacaatagcactaacatttcccatcagtgatggattattcaataaatcatgtctgacgactagggaaccatctagaaataaactgaggatacatactttgtttcttacaccaaaataaaatacaggtagatcaaagatttaaattaaaaaaatgaagtcattaaagtactaaaaaaatgagggaggaattattttaaaataatactggagtggggaaattctaactatggccctccccctccttcttcttttaaaatagtactggagtgtggaaattctaactatgactctttctttccttccttccttcctccctccctcccttctttctttccttctttctcctgctaactcacagaacagatgttttttctaaggaagcccaatggactaaaacatgggacctggcatagcaggacatgtgccatctgatgagcagaggctgaggctctcatgctatcttaagctcctaaaactcaccaagaaacttcctcatcaagctatggcataatagctggtatcaaactggtcttcctatttaaaacaatggtaaaagctgaataaaaacaataaaaacacccaaccaaagacactggtaaacagctctgtcagctcagacttgagaggtccagatcccagaggacagagaaaagcccttagtcacagagaggtcaagcctgttgcccttggagactcatcgatcattgggactaagcagacaagacaagagagcacaacagcctagagcctgggcacactcacagggctgggcaccgagaagcaagaatgagggcgctccagcagccagagctcgagggagagaaggaaacctcggagaaggacgccactccacattctgtgtgcaaaaatctcccccaaagcacttgccagctatcagctatgcagagaggagccagcaagatgatgaacgccaagcagaagatgaacgccaagcagaagattcaccatttgagggtgtcactgcccagctgagaccccagaagggctgtaccctaggaacaaggccaactgaaaacacatttgcctcaatgggacacaggccttctgcctatcccctgtatgatggatgaatgacaatgtcacccagaacttctacgatttctcaaacacaacatctgcaaaataccaggcacactagaaaacaagaccccaggacaaaaaaacaagaagccacaaagaatcaatatcaatacttttttctttttcttcttcttttttttcttttttttttgagacggagtcttttgctctgttgcccaggctggagtgcagtggtgctatctcggctcactgcaacctccacctcccgggttcaagtgattctcctgcctcagcctcccaaagtgctgggattacaggagtgagccaccatgcctggctcaataattactatttgaaacaacaataacaatgtcttgtggagttttaaataagggttgatatcaactgcctagtataatcattagaagaatagaaatgtaccaacaagccaaaaaaagagtaaatatttaaaatgtttgattgatccaaagaaagtaaaagcaaaaacagaaaaaggacatatgagacaaataataggacataagttgaaagttttccctcaaaaatcagttattatattaactgtaaatagtcttaaatactcccattcacagactgaataagaacaagacaaaagtcaactgcatgctgttataagagacataccatgaatataatggactagagaaatcaaaagaaaagggatgaaacaagctatcctgtgcaaatacaaacccaaagcagaactaagttagctacaaagccaactttaaggagaaaagtatttccaatgataaaaaggagtatttaacacgataaaagacaattcaacaaggagatataaccaacttcaatctgtctgctcctaataacatggcttcaaactaaaaagcaaaaagtgatggaactaaaaggaaaaataaacaaatctgcagttacagtaggaattatcatacctttctcacaactcataaacaagatgattaaaaaatccataaggggctgggtgtagtggctcacgtctataatcccagcactttgggaggctgaggcgggtggattatttgaggtcaggatttgagaccagcctgaccaacatggtaaaaccctgtctctactaaaagtacaaaaattagctgggtgtggtggcacacacctggaatcccagctactcaggaggctgaggcaggagaattgcttgaacccaggaggcagaagttgcagtggacctgagccaagatgctgaagaagtggctgacacacgtggacgtgtattctaatgtacactgtaagaatctatttaccgcaacttgaagacaaggcaagatcattccagaatgccggaggacctttggggtgggggtggatgtcagtgaggcatccatagggagctctggggtgccgggatgtcctatgtctgctctggatggtggttccacgtggttcactttgtaaaaacttatcaggttgaggccgggcgcattggctcacacctgtaatcacagcactttgggaggtggaggcgggtggatcacctgaggtcaagagttcaagaccagcgtgaccaacacggagaaaccccgtctcactaaaaatacaaaattagcccggcgtggtggctactcaggaggctgaggcaggagaatcacttgaacctgggaggcggaggttgcagtaagccgagactgcgccactgcaccccagcttgggcaacaagagtgaaactctgtctcaaaagaaaaaaaaaattatcaatatattccagtaagaaaaagctcaacaactccataaaaagtgagcaaagaacacaagcagttcacagaaaaagaaacgcaagtggcttctaaacccatgaaaagacactcaagttcccgccagagaggccaagaatgatgaagcctggaaggtcctgggtgcagggacagaggccttgagcctggctgggagtgacgctgcaggcactttgggtagagccaccacatttacagatgctcacacccctgacacaggattccatttctagaaggcttcctacagacgcgtgctcaaatacgtcgacatgctcatgaacacagatattcatcgcgattctgtctgcaatagcaagactggagaggtgagtccttcggagactgggattatggaatcttcctaccacggaacccatgaaacggctaaaaatagcgaggcagctctgtgcccacggctgtggagcaacctgacctgcacagggttttgagcaaaagcagcaggaagctgtgttacagttaaagaaaaacccacaagcacgcacatctccgtgggagggtcgcaccaggaacaacggtgggtggtggcctcaggggtgggcggctggggaggggactcagaggtggcagcaggtccatgggcaatcaggcatcgcagaaacaccatggggaaagcgcttacgactcagctaagtcggctctcaggaaaacccgatgcacagcttgagcagcttagtgtggccctgctgggcaaagaccgtgcgtcctggtgaacccagggttccccaggctgactggaccaagtcccttttgtgggttttaagtttcttgatagaacccatctgaaaacgctgaaccaggggcttcctcccgcctccacctctccccagcccagacccatcagccctcgtccaggccaccccacgagcagcacgcacctgggaggaaagtgcgttcttgtggattttcttgtagatcagcgccgggcagatgaagcagatgaggcttcccatggtcgctcctgtgaggcccaggatggtctccactaggatggagaagtgacaggaagggatgagtggggaagggctctgggaaggaggggacctgagcttttgccctgcacacgggtgagcaagccagcattgaaggaaatgccgtctaggcgtgagccgggagcagagacgccctctgtgcccagaaagcctgacaaccgcggctgattcctccaacagtgcatttaggccccggggtgaattctctgatggttcatctttaaagagtcagacactagggacctcctgccgaaaccagatgctggctgcgcacggcacggctcctgcgccgcctctcctgcctgctgctccatgagtggccctaggaaggcaggacctatcctagggcaggtgtagaggccagggcctggcgggtgctgccaggctgcagcccctgccaggagcccagacagatcgcctctagggctgttccctggggagagtgcgtgcgagttcccctgtgatgtcatcctctgatgacaacgagctctgtcttgtctgctagggagtgggtgcatttgggtaacataaatatgttcagagccttcaacgcttcccttggtaatgcatcaccaaaatcagaagtcaaaagaatcaacaggacagcatgcgctgttctagaatagttggttctacaaattgagcctgtgtcccggcactgcagtctctctctgcccaggtgtcaatgggtgcctgctgttccatcaagctgacagattttttttttttttttttttttggctggagtgtagtggagcgatctcagctcactgcaagcttcgcctcccaggttcacgccattctcctgcctcagcctcccaagtagctgggactacaggcacccgccaccacgcccggctaatttttttgtatttttagtagagacggggtttcaccgtgttagccaggatggtttcgatctcctgacctcgtgatccgcccgcctcggcctcccaaactgcggggattacaggcgtgagccactgcgcccagcaagctgccagatttttttttttttgagacgaagtttctctcttgttgcccagcctggagtgcaatggcgcaatcttggctcactgcaaactcctcctcccgggttcaagtgattcttttgcctcagcctcccaagtagctaggattacaggcatgcaccatgacgccctgctaattttgtatttttagtagagacggggtttctccacattggtcaggctggtcttgaactcccaacctcaggtgatccacccacctcaacctcccaaagtgctgggattacaggtgtgagccaccgcacctggctcaagttgccagattttatcccctgcctttctctgtgggccagagaaaaactgacaaagtctctagacttttttaagagaccagagaagatggtctctgtgcaggtctcgtaactgtgcaggtcttggttgatgccgaagccccgggtcccactccccggcaacagggcagccctcccgccttaccgttggggataaggatgccaccaaccatggttccaaacaccacagagagggtaagtgctttaaaccggagagggggcatgtagccccctgctgcaaaggtgccatctttttgctgtacaaaagaaaaacaaaaggttttgaaatgactgatttcctccaccactctcctagaaagcaaagcctgaaagggctctgccaggcacaccaggcacatctccacgtgaggccggccgcgcactcacctggcaggtgagcctgaccagcacaatcagatctggctgagcaacttaaacgggaacctgcagcatgccaggaaggcacgagggcttctcaccccaggcacagaccgtacattttacaacttccttttgaaatgtgagtatcgagtccttccgttttcctttttgcttttagagcaataccacgagagttttttaagtgccaggaagtatggagagcaaaacacaggctgcacagcgccgctcctgacaaatgccccaggactctcctggcccacaggtttcagggtgcaggcagaacccccccaaacacacgcacacatggccgtgttatctccagcagatgtgcaacaagcagtgagcaatttcaaagtccaggaagaagaagagagaagggcacgatgaggccctaatttcaagtgcctgttttggccccagtgtgcagccaggactctactgatctgcaccgggatgccagggccattcattccggaggaggcggcagagccaaggacggatggcctcagacgccacctgccccaggacccccagctgtggtctctagtacaggacacaggagccagaccacctggctcaaatccttgctctgccactcaccagccccacctgtgtgtccctaggcaagtgacttctcggtgcctcagtttcctcatctgtcaacagaagcatctcctcatccagccgtggtaaggaccaaataagttaacacacaggacggactggccgtgatgactctccctgggctaggaaacaactgcagaactttctagaactagttttgaagcatgccattttcagaatggacttttacataggatggactgtggaagacggagccagaagttcctatcggcctcagggcggtaatttgtatacaggccatggaggtggggggttaggtccatcacacaagagtcccggtcctagaactttacctatgacatagacccagagaaggggagaggggactttagcacgaagactgtcgtgagatggttagccacgagaggtcaagggtgaaggagcagtgcacccaggcccccgcaacaggtggagaagcaaggaagcagagcccctgcaggcttgtagggaccgtggagaaacgctcacggcacatgggccgaagacaagaaagcaggtggcatggccgcagccgcacctccgggaaaggagcagccacgggcgctgacggaggaaacagccaggtccaccttgggatgaagggggttgcgtaagctttcctacttgagtcacaatacatttaacgccattgtcaattttttaacaagataaaaatgggtcacgtacagaaatacagatgctgctcaggtacaaaacatcaaacactgaaagttggcctggccagatgcgcggagggaccccacggccatatgacgggctctggccttgcctcctcgatcctgcctcacccgtgcccaggtgcctgaactccgcagaagagaggagcaccagcacgtgggggaggcacccagtctttggtgcttggcctctgctgcgaagccagaggcacgtggctggtggaagtctgcaggaggctgtggtgaccgcacacctggccacatggacagtgagccaatgctatcgttcccaaggcccagggagacccaccgcccccaatgtggctgctggactctcccctggattctctgagaccactcaacccgccttggctgaaacagttcaagaggaacgtgtgcctctagccaccaggagttccagctgaagggacataccaggctcacagatctcaggctgcgggacagaagatggatgggccaccgggcagagctcccaaggggaggcaggaggggaacctggacggggcagggctcctccagcactgcagagtggcgtctgcacccccatgctcggagcgcaagacagcacagcgggcctttcatggttcactctgccgcaaggagagaaccaggacagccccacgctcggggcgaaagacagcgcagcgggcctttcatggttcactctgccacaaggagagaaccaggacagccctctggtttcaactcctacagctgaaagtttcttagaaagaactaagtagctgcctggcctacatgtgttacagtgaaaaaacccagcctcactttttatttttctttctcttttagacacagggtctcactttgtagcccaggctggagtatggtggagcggtcatggcccactgcagccttgaactcttggttcaagtgatcctcctgcctcagcctcccgagtcactaggactacaggcatgcgctgccatgcgtggctaatttttgttaattttttgtaaagatggagtcaagtgatgttgcccaggctagtttcaaactcctgggcttaagcaatcctcccacctcgccctcccaaagtgctgggattacaggtgtgagccaccatatccagcctatttttaaaatgtgtttaaagacagggtcttgctctgttgccccagctggagtgtagtgatgcattcacactcagcctcaacctcctggactcacacaacctcgcctcagcctcctgaggagctgggaccacaggcaccaccaatatggcctacatcaaactcagcctctcttatggttcaaaaatctgctatattgttaaaatttttcaaagttacacaaaagtcaagagaactgtgcagtgggccgggcgcggtggctcacgcctgtaatcccagcactttgggaggccgagacgggcggatcacgaggtcaggagatcgagaccatcctggctaacacggtgaaaccccatctctactaaaaatacaaaaattagccgggcatggtggcgcgcgcctgtagtcccagctacacgggaggctgaggcaggagaatggcgtgaacccgggaggcggagcttgcagtgagtcgagatcgcgccactgcactccagcctgggcgacagagcgaaactccgtctcaaaaaaaaagagaactgtgcagtgaacgccatgtgcccatctccagactctggccattatcagctcctgcccatcaatctggttcctctaggctcccccaacttccgccctcccgggactcctctgacgcaaatccccactttcctgctatatctctggttcgggacagctgggggcttatgggaagcgagcctgacctgtgctattacgatccggagagtgccccgagggtcttacctgctgctcacacagcagcgtgctcagggcctgcctgcatggcaggatcatcatggggaagcccacagccactgacatcatgaagcccacacggagcatctccgtcaccaggttggagggaaagtgcatgagcacgttgccggccgtggcctcggtgaagctgacgtagccgaaaaaccccacctgttggagaataagaaatggcaacgtggcagacagacatcctagccgagtggcacctgtcacagtgggcagggcatgggggggacctgtgccctgccccccagaatggccttcaatccacttcataatgaagcttctgcaagagatggccttccaggggcaaggcaccatttcgcctcctccttctaaaaatctctagtttctgtaagaacatgcccatttctttctttttctttctttttttttttttttgagacggggtctccctctgtagaccaggctggagtgcagtggtgcgatcttggcctcggcgtacctctgcctccccggtcctggttcaagcaattctcctgcctcagcctcccgagtagccgggtttacatgcacgtgccaccatgcccagctaatttttgtatttttagtagagacagggtttcaccatgttggccaggctggtcttgaactcctgacctcatgatctgcccacctcggtctcccaaagtgctgggattacaggtgtgagcaacggcgcccggccggaacatgcccatttctacagagaattaacagaggtcttggagagagagtaagagtggctcggataaagggttctgggagcagccctggtgcccagctcctcaggtcaggagagcttcctggcccagggtggacccaggctcacagggctggtcctggaatgatggaagctgatggagctgccccaggtccccgcgcagcctccagacactgggatgggaacagagagaaaaacccagcagcacacagggccagggccatgcctgtggcagtcccacggggcaccacggcacatcatgctggcatgacacaggggcggagagggcgtggcaaggctcttaccatgacgtagaaggtggtgaccacattaagggaggaagcaaatatggagctcatggttttcactgacggctcatccaggctgtcgtaggtgggcagcacctggctgtatagaaacaggccatttcacagcggacctgagagaggcacgccctccccagcggctccacttctaggacctctctgcagcccagtgagagtctctgaccttccttcatgcaacattctctgcacactggaagtcccagcgctgaggccaggacttggtgttgctgaggacaggagcgttgcagcagcccccactcaggacaccccccagagcgtgcaccatgcgaacattccccaaggctacagaacgacaggctgctgctccacgccagggagcgggtgctgagagtcaaagcagccagtttacagggcaagcagccggaggaggctgctcagagaatcgctgtcaagaggagggaaagttaaacaaacacaccctggcctgggcggccggcccatctcggcgcctccatctcggcgcctccgcacaggcatgatcagagtcggcacagacaaggaggcggcctggggcgcgattccccactgcagcctctcacttgtgtgatgagaaaactggcttcggtcccacagcctggtgccaggagtgtggtgctgctaggggtgggagggacccaagccaccagccaggcaaggacatgacagccctgcacaggcagcagacgcatccgagggacctgcacagggacctgggcctctggaaaggggtgggcgagacgacaagggagaggctggggccatggagcatctgtgtgcagccggggagaagggagttgggccaggcacacgccagagcacaggtgagagctgctctgccatggggctgaacgaggactctggagtgggagtccaggggggtgctcctagggtgtccaggtggccatggccatggctgtcccagggcaggggctcaagggcacaaaggaagctaggtgggccgggggagggcgggatgcagaaagccagcagccagtaaatggaccagcacagcggccagcggagccaaatcccaaaccgccttgaagaaagtgaaagaaaacacaggacatcaccagcacagcggccagcggagccaaatcccaaaccgccttgaagaaagtgaaagaaaacacaggacatcctgactttattaaaaagcaaaccaggccaggcacagcggctgacacccaaataccagcactttgggaggccgaggcaggaggatcactggagcccgggaggtcgaggctacagtgagctgtgatcgcatcactgcactccagcttgggtgacacagcaggaccccatctccaaaaaaaagaaaacccagcagactgacaagtgagaaggtcctgccagcagctgctggtgtcccgttgcccaggtcctagcacaccatcccatcaggccgccctcagcatggagtgccatcagcagcagtcaggggaccccgcaggacatgagccttcccctcggcccaggctagaagggagctaagtggccaacgcctgtgcacacagccccaggaggctggcagagaatcaggagaaacacccaagaggtctccacggccctagacccacagctacagaagaaggccatgttgcggcatgaacttcccagtgctaaactgtcctctcgccacagctgagtccacaccagggagtcttggcttgaggggaccagcgttggtgccccatgacacgtgcttacccccagcccccaatacaccctgtggggagtgacccccaaggaagccacggacactgtgggaaggggtgtcccacgcacacggggtggccagggtggaaggccaagccccaggctcctctccaatcctgaccacctaccccagggacccccgggatcatccctggaaagaaacaaggtaggagccacaaaacctcctggccacctgcaaaggagctccacagatgggggacatgctgagcgctggcccatggccccagacggagcatccctggcccgcccaccttgcaaggcagcctctgagcctcagggcctaccagagtcaaatggagccatccacatgcagctcttgggtgtgtgcccctctgccctactgtgaggatggggaccctggtctccagatagaccctgacctccagggcctcctgggctcagtgctgcccggctgcttctctgggcctaggacaaccattctgcataaccaggtatgcatttaccaaaaacggccagatagtgaaggcacaagggagacctggccccagctggcatccaggccaatcacacaggcagggggcgcggcccgccacccaacagggacaggcactctggtgcagtgacgctgtgggagggaagagatgtctctgctctcagaaaacattcctgggttcagaggtggggaggtcagcacggcggccggcacaggggtggggaggtcagcgcagcggccagcacaaggagggatgtccctgctggggagaatgtcaggtgaatccgtgggcctgcacatcctcagggcgggacagaaggaaagctgcacttgttgagccgcacgctccagcgcttcaacccagcacctgactccggaaccagacccgaacgaggtgcaccggctgctacgtggccaccaccaaaaagccccagctgcagatttatttctaaatatgcaaacacgcagacacaaagggcaactggtaactaggtacgtggcggaagaatgcggcttctgtcaccgatcataatgggatattaaacagcaagactggggcgcgttctggtggagatggagctgccaagagagacgctaagtgggaaatgacgatttggatctcgcatgtgggtgtaaacacagcggtatgaacaaatttcatctgtcacattagtttacgattggctcaatgcatgcccactaacgctacaggggccgctctgccagccccccgcatgccgatggtcttttcccgtctgcgccggatttacgcctctcttttcagccggttaccatgttccaaccgggcacgaatcactcgctcttgtcattttggtggagaaggtaatgctgctggaattatggaagagcccgatccacatttacagagccctgcgtgccagagagaaagcaggctcgcgcgcacatgcaggcctccaaatgcatccagcagccgtctgaagtcaatgtttgtgccatttccttttaaatattctcagaacagctaaattctggcgaagcgctcgactctgtgcagtcagatggctgggttgctgctgcatcccccacagccaatgctctgcttgtggggatctggcaaaccagggactctcaccagctagtcccaaacatgtcccaggaatgaagccgatttacctcccgattaaaatataactatctccctcaacctggggcgggaaaggtcatcactgaacaagacatcactctttagcagccagcaaagagcgatcacagtaaacgagaaagagagggtcccgtctcccagcagctcgccctccccgtcacagaactccaccacagaccacagcaggacacttacgactggcaggcgaaggacatgccgaagatggggatgcagcggaagacgccctcccagcggacgtagctgacccgccgcagccactgcccactgaagaggccgtgcttgagagaggagagcacgatctgcagagggagaggggagagagcacggggcaggtcaggacgcaggcgggactcagcatcccggcccacgcgccgctaggaaggagtggcaggagagtgcagctcttcccacccacatcccagccccccaccaccctgtgccgccctgtgccgccttgtgccgccagctggaggcagggagaccccgcgcctttctggattcccaacccctgcctcagagcaccctggttcatcccgcgggcaccagagcagctgctcttgcaagggggctgcttggcgcagacgggaggagaccactgagcatgcatggccccagtttccgtcggttacagaggctggtttcccacgtgggcaggtccctccccatcttgtactgtgttagacatggacattttccaaaagactggcccaccaggacgcggctgtctcaagagtaaagaggtagctgccactgggctggccctcactcggagagctgaggagcactggagaccctggcttcaatgaccacctggcctcgtcctggtgcaaacccgctgtgagacacccaggttccagccactcaggaagggtcatttctgaccttgccagggaacaggaaggtcccaggggctcgggtcctggggctcctatgggcaggggcctggcagagaatggagggtgtgctgggggctctgggtggtatccgtgttctcagtgccaactccacagctggcccctagtccatcctattataaattctcatttagaaaaataatagcggccgggcgtggtggctcatgcctgtaaccccagcactttgggaggctgaggcgggtgggtaacaaggtcaggagttcgagaccagcctggccaagatggtgaaaccccttctctactaaaaataaaaaaaattagccaggtgtggtggcgggcacctgtaatccccgctacttgggaggctgaggcaggagaatcacttgaacccaggagatggaggttgcagtgagccgagattgcgccactgcactccagcctgggcgacaaagtgagactccgtctcaaaaaacaaacaaacaaacaaacaacaatagcttgccaccttgtgtcaaaacactggcaccgtgagccttggtcacaaaccctacataagacatctttgcataaagcaagtggacttggagtttccttcaccttgcctggacgacatgaaaccagcctcagagccacccctgccctgagccccagcctctcctgccagccaaccgcacctgggtccagccagccccgtctgccccatggtgcccagggaccatgagatgaatggcacttcctggtacatcctgctacttccaacacattcccaggaggcagcaggcggccacaccagacctgggcacgagcctgctgtggccacaggaaagaatgggccaggagcagcctttcagcgggtacccacgcgcgctgccgactcaccacgaacatgaacacggtgtagaagaggagggccatggcgctgaaggactggatggaggccatcatgttccgctgcaggctgagcgggagcacgatgcacagcgacacggcgaacagcaggaacatgcggaaggtgccgcccacctgcggggagccggcagggggtcttggccacagcccgtgcctgctcaccaccgggctctctgcactgacagggagtgggagcgccccgagcccgaaagccgacggcatccaggtgaatgacgccggcgggtctgaggctggcacactcgcccgaagccgctctcacagccactgtgccgtgtgcagcctcggacactgggtatttcccctccctggagcccagcccagccccacagcgagaccagccagagcaggacagcagcccccctaacacgggaggcaacacagtggctgtgagtcggactcagctgccctgggcgaggggtgggaaaggtgcagactgccctgtgggcaggacgggcccaaagctctagctacaaaggccactacgaagcacggaaaacggaaggtcgaatggggagacagagtaggggacctagctccctggatgctccttggaactgtctctgacaaggagcgaatctggtacattccactcctggagaggacacccccgcctcagtggcctttgaaagcctttctacgctgttagcaccctaacgtgccgtgatgcctgccctgcccagtgaggggctctgctccccggcagcgagggaaaggtgtgtgggcccgtcaggtgggcctctctgtggtggggggcaagcacggaggaggctaccccaaggtccctgcaagaagtgctgagtccacagcccccagaagctctgggtgaccatggaggccggggatgcctgagggcctggccgcctctgccctccaatgggcagcccgggctggcagagacttgctctgcactgtgcccgggtctgaggctcccccacccgcccctcatctacatggtgtcagactctgcctggcttgcttcctcgcgtgtacctctcacagacgtgacccagcaaagcccccgcactccaccaagcccctagaatgacagcaggctcgacagaagcttctcccgaccagcacccaggtctcggtcctcgggaggatcccacagagggcctcagagcagccgtcagcatctgaacaacccagaaccctgaacacatccttacctgaaacccgaacagccgggcaaagaagttggaccccaagtcgccgatcacgacgtagaaggcgatgcaggtgcccagcatcagcccgatcatgctgcacagggacggggggtacgggaaatgccatcagggcaagctggcacacacctgggctgccgccagggactaccccaaggctgggctgaatgacagatgtgatttcttttttcttttttttttttttgaaacagagtctcactctgtcgcccaggctggagtgcaatggtgagatctcggctcactgcaagctccgcctcccaggttcacgccattctcctgcctcagcctcccgagtagctgggagtagccgagtagccacgcccggctaattgtttgtatttttagtagagacggggttgcaccgtgttagccaggatggtctcgatctcctgacctctgtgatccgcctgcctcagcctcccaaagtgctgggattacaggcgtgagccactgtgcctggccaacagatgtgatttcaaacgcgccccagttcacagggcgcgggcaggttctgtggcgctcgctatgtcacttggcatgcacaccaaacgacactcagcttttctcagcctggtattatactcgcccctctgcggaggctctaaaagttacaaaaatctccatgatgggcctggcacagtggctcacgcctgtaatctcagcactttgggaggccgaggcaggcggatcacctgagatccggagttcaaaaccagcctggccaacacggcaaaaccctgtctctactaaaaatacaaaaattagctgggcctggtggcacgcgcctgtaatctcagctacttcggaggctgaggcaggagaatcgcttaaacctgggaggttgcagtgagccgagatcacagcattgcactccagcctgggtgacagagcaaaactccatctcaaaaaataaaaaaattgaaaaagccccacgatgttagtcaagttaagagaacaatcaactgctttcaaaaaaggctgttcgtttgagtttacaattccctaatttagaagcctagaagtgcaatctcccagcgattttttcatctcataaattttttcatctcatgaaattttatgccaaaggaagaaaaatatgacatttgcaatgtaatgccacctttatgcagcggtgtttgaggggtaggtgaggtgctgaggaatggtgttgagagactacaactgagggaggactgtttaccaggttcttggagttttccatacataaatttttcttacaacactgaagggtacaagtaattggactttcatgtatttagcgactcttcagaaacctaagttacaggtgaatctggggatgaaactgccgctcccaccgggagggtccccagtgtctgggtgcgggggtggggggcaagcgcagcggcagggcggggcttacctggtctccaccagcatcttgcctgccttcccgtaggcgtggaatgctagtgcaaaagaaaaaggaacactcaatccaacagcgtgagaagctcgtccagaacaaaggtactgagccaagctgtcaagggcgatttcacagaaacccacgggcccagattctccggggcatgaggggtatttcaaattctggctgccaggttatttttggatctactgtctgcaaatgaaactacaagaaacaaagacagagcaagggaaggacaggaggcaggttcttctttcactcaatcagattttttaacagacaaagagacaagtccctgcgatgcagtcctcccacccggtgaccactgggggccggctggaaacagcatcccacagcccagcacggccgaaccccgtgctgctggccagagcttgcaggtccccagagggttcagtgccggtcccaggtacccgagcgccacagcctgcaccagagggactctgacggagggctttcattttcaccctttggttgggatttatagaaacaaatggagactcctttcgagcatggtgcttcaggaagggaggggacgagagccctgggcttgtggtgtccacgtggacagctaatgaggagccttgccgatgaggagcatgcgttcccgacggggcggccgaatgcggaaggagccgccattctctccgccctgaccgcgggattctctgcagcagatgagaaacggcgctgactcagcagggtccctcccaggccccgagcggtcatctggtgacccccgcgcttcccccacggcccagccggagaagggcaaagggaagtcccggctccaaggcgcacccagagatgcggtgcatgtggcaggatggcccagccccgtcggcagccccagcttcctgcccctggtttccttcctcccacgggctacaggcctctgatgagctttggaaagcaggaaacacacaggctagtaactatgaatgggtccaaaaaacactccttattactttaaactacttaggaagaagcacagcgttgccaaacgccagagcccgggagcagcaaagaccccacctccagggctcaccctggcctttcctggacctgcctatgggctcgctgaagaagcctggcaccccttgagttcatcccacaacacggaaacccgagccaggccccagaagctgacctgaggctgtggagagtttcaaacactaagaactccaggagccccctcagcagcccacagcccagggccctgctgtcaccaaggaacgccctccacacccctcagtgacggcacagcccggaagcaacaaaacacggcgctccaaacatgaagttgctcctggccataatgtgccttttcattctccaaaaggaagctgagtctctacagcatattccaaacacgagcgcaccttgcccaagaaggttccggaatatgcctgccactggcaagggaaaatgggaggctgtctaggaaatcagggcagcactctcttctggttcccaggacaacgtcctgagagcccaccacgctgagacacggccccacgcgccttcttttccccacctgggccaaaccctcacccgccattcccagtgtcaatccctcggcaacttctcctccccaggttcaaacaccagccccagttggactgaccccactccttcacatcctgcgtggactggcacagagaaagggaggaagaggctgaagcgcccagcaaggtcccggggacccagccctcccccgagtgtggactcccagtgcgggcccagcccctgccaggctggaggtatctgtgagcggcgagctctgagggcgcggcctccatgcagggtgtaccctaccccaggtgcagtcagatctcccccagagccagcacaggagccacagaagcctggaccacccaacgaaaggacgcgggcagcactcctgacaccgctgctcacaaccgagaactcagaggccgcgtgggggccaaacagtccctgctgctgggggaggcggtttctagcccagaccacgcatgccagggttcaggcacaactctcaacagggcagggtctggggctcagaacagcttcatgagaagccgcgacagctgaaggaggctgaatgactgatgtatctgtgtgtcttctgaagaggggatttagaaaagtccatgtccaagcaagacacgcagggcaaggaagcagcaagtgagaaggtgacgaaaacgacaaaaaccacctgcaaccagcaacagcaaataggacagggaaatatacaaacaccaacaaaaaacgacacctctccaggctggcacatggcactggaggacagcggggagggtaaagcgatcagcggccacctccccaggctaaccaacccgaggaaccattacaccgcaaacctatgcctgggtgggggcagatgccattcggaggaaaccacccagccgtcccagggaaagtcagtctgtgtgcgaggacgggacccagcccggcgcctcctgaagactgcagtgtggagctgctgtccactctgcacaagggcctcgcctcagctccaggagagtctcatcttaccctccccagggacgcctctcccagcgcgggtctccccacttctaagacgagccagggcacactgcagctgacgcggagcagctgggcccaggggcctctgtccggagctcacgcagtggaaccaccgtgtttggtgtcaaaggcataacctgagacacacttggtgttttggaatcttttttgtttctggcaggcagaagtggactgcggtcaccccatgcaggtaaaggttggaagctcaggcaggagttccaggcagcacagaagagcacccacccggcaattttcttccagtccttcacatgtagccaaactggtttgacttttcagggactttgaatgaatagacagctggctatcagaaatgggggcctccccagccctgggtcaccggtcttcttccaggacacagccaaggactggagttggggcctctgctacagaaaccctatacagagacctcagtgaggagaaaagggtcgccctgcaggccacagctctgcagacccaggaaggggcccgcccaggcacggtgcctcctggcatccggtaggcatctttcagcccaagttgcattaggccatctcactgtggatcaaacttaacagtgaacttcacttcctcaaataacaacaagaaaagactctgacagcaccattctcatcaggaagggaggagaaggaatacatcccctccggttctgagggccgaaacgaacgcaggactctctgtggcaacatgaaggggactgggaggaagtggaggctgggaggccaggacccacgtgtggaccgtgcaggtgtttttattttgtttggccccctggacccctaaacaccatttcctctcccgccacctcctcactctgccgcgggagctgtgagcccggggggcaggatggccttctgcagggaggacctaacatcccagccgcacactggctggaaggtccagagccttcatcacaaggccagagttttcaccaaaacccacagggccaactcctgagaacacggatgctggaatttcaacacccaggctggatgcccccagaatggaacgtggagccgagaggtgccgagcctgtggcgggcagggagacagcgcgggccacacagcctgtgggcagacgggaaggtgagggatggcgccctcgaagacaaacaacgtagaaaatattccacactgaaatgaagcagaaagcgcagccttctctcctggctgaaacagcattaaagcaagaaagaactaagggaaacaaaactgcaaccaacagcatcaggggaaggacacagccactgggagaggagccactgaactccagcaacagcccaggcctgaggagcttcctccatggaattccgagttggggagaacagcaaggctctctgcaggcagctccgcaggaaggcatctggtgtccaggagagacacagagagagcaggtctgcaccagcacggtgaggacggctgtcttggtctgagtttagaagaggaagcttgtgtggacctgcatgggagcgggcaggagggcatggtgacagggagacctggcgcctcatacccttctgtgtcactccaattttgaagcatgtgattataacaggtttttctttttttttccagacagagtctcactctggcaccaaggctcgagtgcagtggcgtgatctcagctcactgcagcctccacctatcgggttcaagagattctctggcctcagcctcctgagtagctaggattacagatgcctgccaccatgtctggctaattttttgtatttctggtagagatggggtttcaccatgttgtccaggctcgtctcgaactcctgacctcaaataatccgcctgcctcggcctgccaaagtgctgggattacaggcacgagccaccacgcccggcaggttttttttttaactgcatttttttttaatttgatttttaattcttttgagacagggtctcgctctgtcacccaggctggaatacaatggcgtgatcacagctcactgccacctcagactcctaggctcaggtgatcctcccacctcagcctcccaaatagtagctgggacgacaggcacgtgcaaccacacccggctcatttttttgcagcattacattttaaaataaaaaaaaccctgctatccaaggaattcttgaagaatcaagtagagtaaataaataaataaataaatggaataaggcccccgccccaggtccagagccaccttgtggagagggcgcctcacccaggccggcgtaggtcctccgcttgctcaggctggccgacttcaccaagaacatgcacgactggtgcgtcatccatgagcagaagaccaagagcagcgcccccaggacgatgccgcactgcagggtggagacaggaacacatgttcacagcagcaggtgctccccagaggccctcaccccacacacgcggctcatgaggaccctcttcacccccaggccccgctccatcccagtctcctgccgaacgcgacacttcctagcactgaaagggccatttccttgctgtggtggccgcgcgccttgtccagggatgaagctgtatgcgcagagcacaggggtgccatctccttcccagtccccacctcaagtcttcatggacagcggggtgctgccaactaatacccccttgttctctgcacacaccctacatgcaccatctttagccacttaagtccacagctacaagtaatgaacacattctggaagagattaaaaatgccattttccccgttctcataagttaaatagacacttactgtgtgacctggggattaactgcacccctaggtattcacttaccaagaggaatgaaaacgtgttcatgaaaaacctgtatgccaatgtttacagcaggtttatccacaacccaaaaatggaaaaacaacccaaatgtccttcaacaagcgaatggatacaaactgtggtccattcgaataagggaatattagtcagcaggaaaaagggatgactactgacacccaccatgacacggatgggactcaaacgcaccatgctgagcagaggaagctggactctgaatgctacaaacagtgtcattctgtttacaggaaactcagaaaaggcaaacttttaggccagggaacagctcagtgttgccaggggctgggggtgtggagatttggctgatgacaaaggggcacatggggaccctctgggggatgaagctgtgtgttctgtttgactgtggtggttacacagcaagcccatgacctgcaccctaaaaagagtcaatcagccgggcacggtggctcacacctgtaatcccagcactttgggaggccgaggtgggcagatcacgaggtcaggagatcgagaccctcctggccaacatggtgaaatcccatctctactaaaaatacaaaaattagctgagcatggtggtgtgtgcctgtaatcccagctacttgggaggctgaggcaggagaatcacttgaaccagggagtcagaggttgcagttgagccgagattgcgccactgcactccagcctggcgaccgagcaagactccgcctcgagaaaataaaaagagagtgaatcttcctgcatgtccactacctccatcgaggtgacacttaaaacacaaggaccgccacactagtgcgagacgtcagtcacgtgaacctagctggacggtgaggggggcgggggcgctgcactttccagtctgttgttctgtagacttaaaactgctcaaacacataagtccggctgggcacactggctcacaactgtcatcccagcactttgggaggccgaggcaggtggatcatttgaggtcaggagttcgagaccagcctggccaacatggtgagacccccacctctactgaaaacacacacaaaaaattagccaggcttggtggtgggcgcctgtaatcccagttacttaggaggctgaggcaggagacttgcttgaatctgggaggtggaggttgcagtgagctgagattgaaccattgcaccccagcctgggtgacagagtaagactccatctcaaaaaaaaaaaaaaaaagtaagtctattaataccaaaaactcatgagatatcaccaagcactcatcagaatggctccagcggaaaagacacgatacccaatgctaccggggatgcgggccggcatgtgcaccactgcacccacatggcagctccagagcggagcacacgcaccctggggcccggccactccacacaggcacgcacccagcagaaaccaccccctgccaacgcctgtccaactcctcagggcatcacaagagctcccaataggagacaccgtaaatgcctcacaggggtaaactacacacagacacgcatggcggtgcagcggacaccagaacgcaagccagacactcgcactagacacctgcacagcaggacccacccacctcagttcaaaccaggcagcaccaccgtggcacactaggggtcagcagtgtgccccgggtaggccgccacggccacagagtacgctccttaatttgggagctagtcacacgggtttgctcgtcatatgaaaattcatcaacagcacatctaaagaagtgtgtacacatttttgtatgtcaaacttcaatgtttattatatatataatctatatagatctatatctatatctatctagatatagatatagatatatatttttgtttgtttgagacagagtctcactctgttgcccaggctggagtgcagtggcgcgatcttggctcactgcaagctccactcccgggttcaagcgattctcttgcctcagactccctagtagctgggactacaggcgcctgacatcgcgcacagctaatttctgtatttttagtagagatggggttttatcatcttggccaggctggtcttgaactcctgacctcgtgatccaccctcctcagcctccaaaagtgctgggattacaggcgtgagccaacacgcccagctatgtatatatataaatatatcaaaactactaaaacaaaaaaaaaaacactaatccaaagtttttcaatgccaaggctgccaaacactaaacacacacatccccaaatcgcctgctggcgtctccctgcgccccagtccaagaaggctgccgtggaggagacgctgcggccagatcagagcaactgggcctccctctgggcagccctcaggactcagaaggacgtctctagtccttcacttcctgacaggtctgtgcagatgcccggctaatcagcacatgctctggcaggggcctaatgtccaccacatggcaggtggtccaaggctcgagatagctggatcgtctgggccctaagatgtactttcacaggtgtctaaaccagagccccttccacggtggcacttcaccgacaggcatcaaagatgacagcatttggggccaggcacggtggctcacgcctgtaatcctagcactttgggaggccgaggtgggtggatcacctgagatcaggagttcgagaccagcctgaccaacatggggaaaccctgtctctactaaatacaaataaataaataaataaataaataaattagccggcgtggtggcacatgcctgtaatcccagctacttgggaggctgaggcaggagaatcactcgaaccctggaggcagaggttgcagtgagccgagactgcaccactgcactccagcctgggtgacagagcgagactccgtcttgaaaaaacaaagataacagtctttgacttgcaggagaaggaccagctactgctccacatgccagaatgcagttctgctgccaggcaagtcacagtggacactgggacatggagtcagtccagaaacacccagaggtggctggcagaaagctgggattctccacgcccagaccagatgctgcccggggggctctggaggcatgtagccctgtcttcccctgacaggctcaccaaccatatcaggcaaacaactcagacacaacagcctggagggctgcacgggagggtttgaaaattccttgatcaaaaaaaagttgttttttttttagagatggggtactgttgtgttgcccaggctggagtgcagtggtgcaatcatagctcactgtaatctcaaactcctgggctcaagtgatccttctgcctcagcctcccgagcagctgagactacaggtatgcaccaccatgcccagctaacttttaattttttttgtagagacggggtcttactatgttgcccaggctgaaaaaattttttggatatttttattccaaagataatgaatatgaaaaacacagtgtttgctaagctaatctaaaattaaactactggtgccactttgtttcaaaatatacatgttgttttcatttttctacctacttggtaacgtttcagtcagcctttcttttccaaagcactaaatgcttgtttattgtagattaaacagatgacacttagaaatggccattttctttcatgtgttattcaatgctggaatgacgctaaactttttgtatttgagattttttccaactgtggtaacgtctgcacacattagatcaaatgtgcagttttttgtttttgtttttgagacggagtctccctctgtcgcccaggctggagtgcaatggcgtgatctcggctcactgcaaccttcggctcattgaaaccttcgcctcccaggttcaagctattctcctgtctcagcctcccaagtatctgggattacaggcatgtgccaccacccccggctaatttttgtattttcagtagagatggggtttcagcatgttggtcaggcagttctcgaactcctgacctcaggtgatccactcgcctcggcctcccaaagtgctgggattacaggtgtgagccaccaccccctgccaaatgtgcggtttttgtgaaacgcagatcttaggtgtataacctggtggatgtttttaatcaccttgcaaccaaggtccctatctagtgtcgaagcctgggagtggtgagttgtgtgcttctgaagacaggtgcagttgggtcagagtttttaaaaacacgataaaatgtaaaaatacggagtcccaccgttcccttccgattctggaggatcattttgctttgttacactttgcttcggtatcgagtttttgagtgtggggaactttccggcccgggctgacaagggctgccagggccaacgccgtgcgcttctcatccacggattctctacgggaactgcgccgggacccagagggtcgccccgcccgcggccgcctgcacccgcccagcgaagccctgccccggcgggaactttaaccaggacgacccagccagacgccccctctgcgggggaggcgagggcggtgatctccgggcccaccggactcacctgtttgaagcagaagggcatggtgaggacactgacccctacgatgctgttcacgatgttcgtgatcagcccccagttggaggcggcggccgcggtcatagtgagaggtctaggggcccggggcgagaggcctcgggggtcgccgggctgcggccggctttggaagcccagcccgaggccacggtcacaggtcccaacgtccgggacgccggtggggaggggatgggcagcctgaacacgggagcctgagcaggcgcgggcgcgggccccagaggctgcctggaggaggcagcctcgaaggccggctgcgggggcgaggtcaacctccggaccccgccaagccctgcggccgcctcagggccatgcgtccctcgctcggcctcgcgggccgcctgtgaatctccgagcccagacccggaagagccgcagagccagctagggacacctcagcccaactcagctgccgccgcggcgctcacacttccgccttccacgggctccgttgcccggaagtgacggccagggggtagggtttggtgggacgcgagccaatgagaggcgggcccggaggggcgggcggaaactgggccggtgggcacctgagggtctcgcagctgtccggttcgccaagctggtccagccgacctgtgcccggggccccagttcaacgagctggaggacaagggactcgccccgcgaggcctcggtttggatgggcagtcgcgggctggagagaaggggaggcgctgtgccttccggggaggagcgggtttaagggttcctttttgacctttattcccaggaccgattctggggcgagtgcttggcgccagggcacgggggcgggggccctgactgcctcagccgaaaaatagtctgttgtgaggaattagcacctaggaggtaggaatgaaacgctgggcacagagaggctcggccactccgctaaggccacacagctccaaggggaggcggtgccctgccgaactgcgcccagatcagtggcaatgttgaacttcaccttttcacacgaaaagagcaagggacattcctggaggggacaggagaggtggaggcttacatgaacagggaaacccgggagggcttccagaaggaggtggcttctaggctggagcttgaaggacaaatgagaattcctcgggtagaaatggagaccggggagaggagagaacagagaagggtcccgatagatctgtggattcctggcacctagctgctcactctgagtctaatgaatgagcgcgtagaccgaatggctgggaagcagcaagtgattccaggctgctgggggaggacggcggaggaaaggaggccgtgtctgcagcacctgcaggaccaggtgtcttagaacagaggcccgttcctcaggcactggcagtgcagccaccaagtaaggctgtgccccaccttcaggagaacaggaggaaatgcctgggtaaagactaattaaatacgcaggcaaaataacaaatgcctgcgttcttttttttttttttcttcagtcagagtcttgctctgtcgcccaggctgtatatgcagtggtgtgatcttggctcactgcaacctccacctcccaggttcaagctattctcatgcctcagcctcccaagtagctggaattacaggctcccgccaccacacccggctaatttttgtatttttagtagagaccaggtttcaccatggtggccaggcttgcctcaaactcccgacctcaggtgatccgcccacctcggcctcccaaagtgctggtattacaggcatgagccaccgcacccagcccatttacttttatataaatgaaatggcatacacattccataacctcctttttattatgtaattttcatcaaatgttatgcatgcgaggtaggctgggcaatttacatgtatgttttcacaaatagcaaataccatggacccgctattgagctttaagaacaaaatattacc

SEQ ID NO: 557 - DNA, 127446 bp, Homo sapiens
  source 1..127446: mol_type = genomic DNA
ggcacctgacacacatcagggcctccccttctctgccctgagttcttccatgctgctacaggtaggagtcagctgttccacccactgtaggactgtgggcagcattactgaggtgaggtcatcttgagcagcccagtctcctgcacacttccctctttcttttgagggtcttgtcctgttctctgccctggtgcccctggaagcaactttctctgattacctctgggttcctaaagtgcatggcaccattaaggaactggagctagggaaatgcctgcaatgctactggctcctgctaggcaattggaatcaaagcatatttctttctttctttctttctttttttttttttttttttttttgagacagagttttgctcttattgcccaggctggaatgcaatggtgcgatctcagctcactgcaacctctgcttcccaggttcaaacaattctcctgcctcagcctcccaagtagctggaattacaggcgcctgccaccatgcccggctaactttttgtattttttgtggagatggggttttgccatgttggccaggctggtctcgaactcctgatctcaggtgatgcaccagcctcagcctcccaaagtgctgggattacaggcatgagccaccacatgtggccggaaccaaagcatatttcaaacccctcacctgacctggttttcatcatcacatgaatttccctgtctcatccttcttaacctttcctttgatgggaagggagacagctcatctgtctggagcggagaatagggcctgtgtggtgcacacacatctctggtagaaggcgcaaaagtcctcgaggctctttggtgtgtccagaactatgaacctcacccagtgcctgtaaattgtgtgtgtgggcctgggggcgagctcagagcacagagttaacatcctttctgagagtgctgcaatgggttgtcggctgctagaaggggtctgctgtaagctttgtgggcaaactgaccaccctccacccccatacacagaagagccccatcctaccctctgcagacgtctgggtctgcgatgattggccctggatgcaagtaaaagctgtttctcctttttgtcagcctgggaatctgaacaactgaggaaatagggaagtcggtgacagtcacagtcatgaacacccagcagattccatttccccacagcaggaggcagatcccttcccacccccaaaagcccccaggctctggagggaattcaaccaagcagggctcagaccgacctccaccagcgaggcttctccttgctgtccccttctgctcaggcgcaacgtggcagggcaggaggaaacctctctgcaagagttgccgtaccagagcacatggggtggcccgatctggggagacggggcacagaaggaatgcagggcatgggtgggtgaggggaagagggtgtggagccctggctctggcttgtccccctctcacccctccaagttccagaggtctgggctcctcattcatctcgtaagcgccaaggtggaggggggtcctaccgagggaggagctacaggccaccgcgaccagcagagagcgaaggcaggagggaccagcctggcccagccccttcattttactgtcgggggtagtgaggaggaagaggaagaggcgaaggctggcggaggaggaggtgagagcgaggactcggcagaagcgagatccgccgaagggaagtccgagcagtcggggagctcaggggggccctcccggggagagggtcgcgggctccttctgccgcttacctgtcgcgccgaggcaaagccgcagccgcgccgcggggtggctcccgggtttccccaccggacggccgggagggtgggaccggggcgggacctcccccagctgcactaacgcgcccgccccgcccctccctggccaggtgcagcgggtcccgccgtgtcctcagcctgctgcgggcccgggaactcccggcggaccggcagaggggcgccccggcttctctgcgtctcagcccgccccgggggtgcggtctttgcggccaggctttcagcgcggaaaaagattggagggtcctagtcaccccaaagaggacaggcattagcagagccgcgggcggcgggtgcatggaaccggaatgtgctgcgcgccagcctggagcgctcggagcccggaggcctgccccggagggggaaacgcggcggggcggccatgggccccggggtcctgccccaggtttgcttctcatttgtgctccatccaacaagagctcgtattccgtgtgccatgaactgtgtcaagggctccaagtgccaggtatcaggtgaatcccagccccagcaaactttaaacctactatgattattccgaatgtaccggggaggcagctgctcacacagcagagggtgtttctcaaagtgggatcccccaccagcagcgccagtcagaatcacctgagaacttattagaaattttggccgggcgcggtggttcatgcctgtaatcccagtactttgggaggccgaggcgggcggatcacaaggttaggaattcgagaccagcctggccaacatggtgaaaccccgtctctactaaaaatacaagaaattagctgggcgtagtggcgggcgtctgtaatcccagctactcgggaggctgaggccggagaatcgcttgaactcgggagggggaggttgcagtgagccgagatcacgccactgcactccagcctggcgacagagcgagattccgtatcaaaaaaaaaaaaaaagaaaaaaagaaaagaaaagaaaagaaatgggccccaccgcagacctaaatattccgaaactcgggttgggcccggcgacttgtgttttaaaagccctccgggtgattttgtgcatgctcgaccttgagaaccctgaacaattagtggcagggctggaatgagaatcctggtaaacccgcctcctaagccggtgttcggaattaccccgccagggcccgtgctgctcagtggtcctctccggcgctgcctcgtgtgctgcaatcttttggggccttagcaacagagaaggagcgcgcatgactccaaatagccaataatttgaaaactttctatggtagaaacttctaccactagttcagtttctcttttgttttgatatttaaataaatttgtctttctttctttctgttttcttcctctttctgctgccccgcctccctccttttttcttttttctttctttcttactctctctgtctctcctttctctctctctctttccttctttctctttctttccttctttttctctttctttctctctttcttttcttttcttgctctactgcccaggctggagtgcagtggagctatcacggctcactgcagccttgacctccgggtctcaagctgttctcctgcttcagcctccacagatgcatgccaccatgcccagctaacttttttttgtagagagggagtttcgccatgttgcccaggttggtttcaaactcctgggctcaagccatcctgttgcctcggcctcgcaaagtgatgggattagaggcatgagccaccgagtccagccatgaatttgtatttctaagaccctaagacctgggagcaggagcatgagtgagtagatcctagcaagaagttctgacacgcactgggaaaggcagggaagccagccgggtgttaacaggtgaatgaagaaagtaatctttttttctaacctgagactccaaggtaggtttgatctattcagaaggtgagatgttctttgatggagtcaggagagaaggccagcagagtgtggagaagaagagttgcccagctacacatgatcagagtgacgtgaaggatggacattctcccaggagtagaaaggggttcatctgctcactcttggcatgatgcccgactcccctaactctaagcagccttccaccaactcccttcctttcacattccaggccgtgggctttaagctcctagagagactttctacagagcttccttgagcatcccttagcccatctgtagaccctctggactctgattccacctcactgccccagctgcttctattcttgtcatgtgccttacttgacagctgtctttctcagaatgagggcacttcctgtggaagattgtgggatgctgcccctcatgtctctcttcttggggctgaacactccctgtacaggtcggacctaccgtctttgctctgtccttcctccacctctgccctttgaccctcaggggttgtgtgatcctgacgtgagtcttgcaccttagtcaggacccaacctaacctgaggtgaatggcccctattccttcccaggacagggtcatggccattacccccagcctggtgctcctgagagggccgggcccagcttcccaagaagtagcagcagtctgcgttgtgtgtttcgcattccggaagcaaattactcatctgattttacttcagctgacgctgattttaaatgtgacttggaatcctcagaataattagctgcctaatttggaggttcatgagtccgcaggatgtgtgacccacccctaatgtgtcatgcactgagctgttctctcctaacaggaaggacggtgcaggcttcctctccaccaagccaggaaggtttgcagatgagccaccacagaatagtgactgcaatttctgcctccgctggtacaggcaactttcgaaaaatggttttttaggctgggagtggtggctcatgcctgtaatcccagcactttgggaggctgaggtgggagatcacttgaagccgggactttgagttcagcctgatacagcgagaccctgtctctacaaaaaataaaaatacaacaggcacgggggcccacttgagggtggagggtgggaagagggagaagatcaaaaactacctagcgggtattatgcttattacctggatgacaaaatcatctgtacaccaaaccctcgcaacatgcaatttacccatgtaacaaacctggacatgtactcctgaacctaaaagtttaaaaaacatatatgatagtgaaaaaatgaaaataaaattagctgggtgtgttggcatgtgcctgtggtcccagttacttcggaggctcaggtgggaggattgcttgagcctaggagttagaggctgcggcgagctgtgactgcaatgctacattctagtctgggcaacagagcaagaccatgtctctgaaaaaaataaataaaaaaaaaacgggtttctgtaaatgaaaaagttatacgtaaatgaaatggaaaataaaaatgaaaaagttatatatgcacatggtaataagtcaggcactatgaaaatgtatacagtgaaagctccatttcccacctctctagacattgtctctatctccagaaaccttgggtccaaggtcccgtgcatattcctgactgaaagttcccataagcgcttctgcaggacatgtctagattctgttaactgcaaagacccaggatgaccccttctcaggaagtcctatgaatttcttttttttttttctcacgatcttatttttatttcttggctgttttagattcgggttttgggtgttctgagtttcacttttcacatgagtgtgcatcaagggtgttccccaccataaggcaggaaacctggaggggagcagaacagtggaagtgtgacaaaggcagctctgtgaggccgttgacaccagccctggcctttatctagtctcttccttccacacggtccctggtgaggggatacccacctctggtggggcagagtgagggagacctgcccttcagggggaggtgctggctccacttagctaggggagtgtgcaagggatgccgtgaacttgccaaggaggttagtagggaggccagctggtcaacctccctctgtcctatcactacctctcatctcacccactctcctctaccctgagggaaacaacggagtctcccactccctccctacctctttgtttcttatctgtgaagtgcagttaatgatacctggggttgttaatgaagctcaagtgagataacacatgaaagtgtgagagttgggtcttctaaattacatctgctgctctactttcctgcatattcacatttactcctcatctcattcccatgctcaggagagaaacagttaaagcgagaaatattttagggaacccaagcagagctgctcctagttctgccataatcactcatgcgctacaattcacccatttctgtgtgcctcaatttcctcatctgtaaaatggatatgttatttttatgattgggttgtaagattaaataagcaaagtgcttaacccagcatctggtacacaataagcagtcagttgaaatttggatgttagccattataatattagctgtttttcttctttccttcctccattcctcccttcaataaaatgctgttaaagtgctccatgtgttagcctctatgctaggtcaggtgtggagatacaaggataataagtcatgtctgtctcatccagacacccatagtttgtcaggggagcctgatgtaaaaatgactatgaaggagcagggctaggactagggtaaggcaagtgagggcacttctcttgagtgcaaaatttatgggggcatctaaaaactcagtaaccaagataaataatactttaatgcaatattttaaaaaaatcaaaattaatgcaaaaaatcagtgatggacaaagtatcaaaaattcaaaataaagaatcagctgggcctggtggctcatgtctgtaatcccagcactttgggaggctgaggcaagaggatcacttgagcgcaggagtttaagaccagcctgggcaacatagtgagaccccatctttatttaaaaaaaaaaaaaagactagtttccttctaagccatattgaagcctaaggaaaaaagaaaaatatataccctcatacatatttttctgtattttttgaatggttattttttcctagagcattaaagtagttgaaaaaacatttaaaacttgaaacataggtgtattaaaactcacagcattactttaaatattttatttgttccaaaatggaatttattatgattttacttcagccttagttaattttttttttttttttttttttgagacggagtctcattctgtcgcccaggctggaatgcagtcgcacgatctcagctcactgcaacctccaccttccaggttcaagcgattctcgtgcctcagcctcccgagtagctgggattacaggtgtgtgccaccacacccggctaatttttgtatttttagtagagacggggtttcaccatattggccaggctggtcttgaactcctgacctcgtgatccgcccacctcggcctcccaaagtgctgggattacaggcgtgagccaccacgcccggtctcagccttagttaattataatttatttaagatcatcacttggtcaagggaaactgtcaaacgtggcaatcttacaattcaaaatgaaataagcaaaacagttagttttgaaaatatgactaatgagtttgcttgccttaaagccaggagcttgtatttttccttttgcctcaagctccaatttggcttagcatggcattggattgggacgtggacaaagaacataaagagaacagagaggagaataagagacagggagaagggttgaaagagtcaggtgggatggggaatatattatttttcctaatgatccaaatatcacattttcaatgtgcaaaatttcagatgcacagaaaatcacaaaaaaagaagacaagttatccataattatgttacctagagataaccaatgttgctattttggtatgatatagtctgctctttttctatgcatatatgatttatatgtacatataaatttcatcaattctaaggtgcatttttaaaaatctttaacatatctgaaattggtatgtatcttaaattgatggtgttataacttagcagtgttggataatgcctgtaatcctagcactttgggaggctaagacgggaggattgcttgtgtccaggagtttgagaccagcctgggcaacatagtgagacccctgtctctataaaaagtacaaaaattagccaggcatggttgtgtgtgcctatagtcccagctactcgggaggaggctgaggtgagacccaggaggtctcaaactcctgagctcaagtgatccacccacctcagcctcccaaagtgctaggattaaatccgtgagccactgcgttctgctcgagtatccttatttttacaagtgagaattttataagcacagcagttccctgtaactgcagtctgagcccttagccactactttttgcaagtctgtctctccatttattcaagtttctagtttatgatcctcagaaaagttttctagtgttctctctcctaatctttacagctcttgttaaaatgattccttggcattttatattacctattttaggagactcttgatcagtctttcttttgtataaccgaagcctcctaatatcatacaattaataagtgttcctctcttggggttgtcaaactgtaactatggactttctacttaaatcacacaagatcatctccttaaaagcaatcaagtgcccaagatctgtcctttcacagtagagaaatttcacaactgcaatgaataaaacatccaaatgcttgtaagattttgctgtgagagctttttctgctcaaaattatgatttcttatttaatatctctctttaaaagaagaaacatatgcacatttaaccttctgaaatcttaattggatttcaatctgacagttgttttgcccaaagagaggtaataaaaggggctataaactaactccgcagagcaaacaatcctccagctaaaagcaaaacctgttatcttcccctaaaaaaagagaagtttctgtttctttctttttttctttttttgagagagagtctcgctctgtcgcgcagtctggagtgcagtggcctgatctcggctcattgcaatctctgcctcccgggttcaagcgattctcctgtctcagcctctggagtagctaggattacaggcgtgcgcaaccacgcccaactaatttttgtatttttgtagagatggggtttcaccatgttggtcaggctggtcttgaactcctgatctcaggtgatccaccttccttggcctcccaaagtgctgggattacaggcgtgagccaccacacctggctgaagtttctgttttcttagacatttgaaaaatcacaaatttcattaggattgaagtctatctgatattaatattactttggattgtaagtaaaggagaggtgatagaataactcattggtagatgagtccagatgtttaatgtcctcttaatatcctaaaatgtttgcctcattgtttattaattcccgtggaatcttatttacttattttcaataggtgatatgtgcatatggcaaaaaaaatctaaagctcaaaagtatagtgaagagggagtctccctccttctcccatctgcagtcacctagttttcctccccaaaggcagccactgttactgatttcttttgattctttctagaaacatagttcagaggagtcaccctgattttggcaagtactttaaatagcagcttcttaattttttttttattacattgcccataatggttaaagttattttaaaagtagtcctcttactgagctctctttgtggctctgatagatttccagaggattctcttgattttctaggtagacggacatatcagcagcattcaattttggcaaagtgaaaacagttttggagtgagacctgggttgaatcctgactcttccagctgtctgatcttaaatctagcctttaaaacatgttgggccaggcgtggtggctcacgcttgtaatcccagctctttggaaggctgaggcaggcagatcacgaggtcaggagattgagatcatcttggccaacatggtgaaacgctgtctctactaaaatacaaaaaattagctgggcatggtgatgcgttcctataatcccagctacttggtaggctgaggcaggggaatcgcttgaacctgggaggtggaggttgcagtgagctgagattgcgtgactgcactccagtctggtgacagagcaacacttcgtctcaaaaaaaaaaaaaaaaaaaaccatgttggcactgtccaaaggtagcacagaggtacgaagtggtccctcctcctgggtgtggtgggtggagtgggcagaggccatgcagacccaagcactgccccttggccctctcctgggtttgttccacctggacctgcagataaatccagaggcctttgatctcaaggatttctaaccacccagagatcaggaggaaagactgcaaaggaagccctaaagtagaataaccttttctttctccatgaatggaatgtaagttatgtttgctgagggcagattaaaatagattttattgtttgaaatcaggaatttacagaaactctttgaagagctactatcatcgaagacctttaaatcccccactgtggtagtgggcaaaatagtcacgtacaattgtaatgtgtatagatgtgtataggttttctcagagttgggacccactgccaggcagggagttggtggtatttgatgctgttgtttggggaggagtggtactaagaaaaaaaaccatggttagtgaggaaaaaacaaaaaacacaaaacacactctcagttgcccatagagttatatcagtttgatgggataccctagaacacctcaggggtctgtgaatcctttaaccactcaatggaaaaggtgactggggtatagattgtctagtttgtttatatgacataacttttttccaacggtacttgagaggagtgtgaatgaactcctttatatatatatatatatatatatatatatatatatatatatatatatatatacatacatacacacacacacacacatatataaacatatatgtttatatacgtatataaacatatatgtttatatacgtatataaacatatatatgtatatacatatatatatatttttaaacagggtctcactctgttgcccaggctggagtgcagtggcaccgtcacggtgaaacgggaaaggttcccttgtccccctcacagggagtgcaacaaggggagtggctcgcttctttagggcccggctgctgaaatctctatggaacatacagatgggcaggttgtggggttcagatcccacggcagcgtctacctttggacagtgccaacatgtttttcttttgtttgtttgagacggagcgttcctctgtcgccagttagtgtttacagctcctagccccagtgggcgtgtgctaccgtgtgctcttttaattttgccgtctgtaggcggctgtgctaaccagctggattagaccctctgccttatcgcgaggttttctgtatcccgggttcttgccttggtgtaccggaaaaatcagatcatatgtgggcttggagaatgagtgcaaggttttattgattttaagtagctctcagtagataggggagccagaagggagatggagtggaaaggtggttttcccctgagttgggccgctcagcagctgggctctcctctgactgccccaggcaaactctatgtctttccgtgggccgatggcgtgccagcgtgctggcatctgccactgcatgttggtatgctcttccaccagtgtattcctctcgatgtccagctgcctgtgcgttcctctactgatctgttcctcttgacgtccagccgcttgtgtctctgcccgctcgggtctcggggtttttataggcacaggataggactgtggtgggccacggtggtcttgggaaatgcaacgtttgggcatgaaaacagaaatgcctgtcctcacctaggtccctgggcacaggcctgggggtgcagccctagccagggaccacccccttcccttcccagcacttccctgccccactcccatatcaactcttcaatgcagcctcagcctccccaggctcaagcaatcctcccacctcagccccctgagtagctgggagtacagacatgtgcaaccacacccagctaatttttctatttttttttgtagagatgggatctccctatgttgcccaggctggtctcaaacatctgagcttaagtgatcctcctccttcagcctcccaaagtgctggaattacaggcatgagccacagtgtctggccccttcgtatcttaaccaccaggagaaacagacctgaagtgatgccttgatatatgtgtgttatgcaagactagagtaagatttgacaggcatatatggttacaacagggggtgagctcagactttgaaaagatattggcttcactccctaatcatcaagacttggaatatcctgggattcagctgttgttgaagggaaaccattccaggtttgccaaacaattgagtgacttaaggggtgcaaagctagaatgcttcaagaatagagggagaagaagccctgctgtgctgatgggctctctatggtgttatcctgtcctggcatttgctaccccgataaactcacaggtgctaaatttaaaggctaaagtgaggcctggcacagtagctcacgcctgtaatctcaacactttgggaggctaaggtgcgtggatcacctgaggtcgggagtttgggaccagcctggccaacatggtgaaaccccgtccctactaaaaatgcaaaaattacctgggtgtagtggcgtgtacctgtaatcccagctacctgggagactgaggcaggagaatcttttgaacctgggaggtggaggttgcagtgagccgagaccgcgccattgcactccaacctggggtacaagagtgaaactccatctcaaaaaataaaaaatgaaagctaaagtggtcagggtagttgactcctaggcatttatttgtccctttgcaattaatctaagcaccatatggtgattccactctccttgccagtgatgggcaaagacgggtgtcttctgggggtgcttgtcacttatcctgttcttcacagcgttatcccatggccagatgctatgggagaggcatgtctcagtatgggactgggggtccctgatagaatcccccccagtgaaaggagagactctgagaatgactgcatgaagtcccccagttagctggcagttctgtagtcatgggtaagttgtttagcctgttttcatttttttttaaaggacaattatatagagtctgttgtgaaatttagattaggtaataggtataaactgctcagaacagtgctcagaacataataaatgctctatgttcaacaagaacaacagcaacaaactcagaagcactcctcgctaccgccggggagacccaggatacctaaactttactgagttggggccactcaagcctgaacagaaggatcagtggagccaacatgtgagtttcttgatatgtgcctgttactccaccagaaagcgttacttactcatttccagagtttgggcaggagccatgacagcctgttgatgagcttggctgaatcatgaaatttggcctgggtttgagggtgggcaagaatggccgcttggatcctgctcaaagttctttcgttttaggtttactcccaaagcagctgaaagcagtgcacaggatagaaatgaaacaagggtacatttaggtgggtggctgctgcttcccatggcctcttgtgtcaactcccaaagaagcacccctcagagtctgccgatgttaccattcagtgggggagaaagatgtttgccagactggagcagcagataacggcaggttcactgcctttataccccagccacatggcacccagaaggaataagaacacctattttatttaacacccggcaataattctgttaatcaagccatgtcacccaggtctaaagtctaagcattgagattcttcccatgtcagccttggggcaatcattccttatctgtacttttgccgtaggcagggcggttgctagcattgctaaaaggcatcctttctgttgggcagatgcaaagctatacattaggatgcttgcttgacaagctaagtgtgtgcaaggcacaaaagttgcacaaccacaggtggtggcagtggctgcagggccctggagttcccatttctgcttggggcctggcacagtgatctctgccttagggtagacaagggaagtaggcttcactcagggtgaagtcagacttgtgagcaaatcataagactcttccgtgtggccactgttgctgcttgctgcaacacaaaagcagacgcaaataggacatcgggagctacatgaaggggttagatggctttggaaccctgggctgcctggtgagcataaaattgtcagtctgtggaagttgactcctgaccaaatgcaagagaggctggggaggttgactatgtacaaggagaggcagagattgggatggggcagtcaagtacaaagaacctgctttttcctttagcatcttttagggaactaccttcctttgattcttagtccatgaaattcagatgaggccctcctcactccctagcgccagccaggtgaatcttaaatcttgtagccacagtgattggtttagggttaggcatgttacccaagccaggccactcagagctttctctgagacatttcttagggcaagcaaaaaagatgaactcctccccccgtcttttctcctccatccccacatgaccactgatggaatcattagatgggaagttatgtatgtttagggtggctagtgatcatctttgctattacatgaggcaggagagtcaacttgaccgtgaagccaacgctgagaaagcagagaaagataaagaatgagaggactccagtgatatcttttggactcctgggtcctgctgtatctgaagtcatttattcctagacttctcctttcttccactttctttgctttctcctcccttccctgctttctttcttcccttttcttttgtctctttttctttccttatttttttcttgttttgattgaaatttgtttgagtgtgtttttgtcactttcaaccaaaagaatctgatcaataaataatatgatgcactggattaagttattgctataagggcgtgaaaaggcttgaggtaaaagggctgtctatgttcatgaaaatccaggtctggcagggaagaagcagagagaaactgccaagaaaagcttaggaaatgatgcttctgactctccagggagcagagaaagggagttgggtggtgactcacagtggggaggtgggaacacattggattggaagggatggaccacccatccttgtgggctttattctatgagatgcccttgaaccatccagtttctaggcaggtcttggagatcttggaagaccaggaaactggaagccttccccctgggagagaaggtgatcccaagaatagagaggcaagaggctggttagtgtctggcctattccaagcgcttcaggacatactgtacctcattccctctgagcactggagaggtcaccatttctctgcttcattacaccattaggctcaagcctgttgatgttctgtgcctaaccatgtccctcatgtttgctttgaagaggttgcacccaaattccccagtgggggtctccaccattatatataaataataccgctgtaaaccccctttatgttcatctatggccattttctttctttttcttttctttgtagagacagggtcttgctatgtttcccaggctggtctcaaactcctggcctcaagcaatcctcccacctgggccttccaaagtgctgggattacaagcgtgagctaccatgcctgcagggccccgtggccattttcttaggataaacttctagaatgaaatgtaccaggtcaaaggttatgaacattattaaggttttcgattcattccaggaagaaatattatctattactagaaaagagatgtaaaaagttccagcctttgtcaactaggagagtgatgatcatcaaataccacacgtaagaggtgacttgtttttcagaaaaacagagccatgtcatgatgcctataataaattaaattaaggccataaaatagggtgtgagtgcagcagatcatgtggcattaaacaaattggactgtctggttccctggagatatataagacaaacacaccagagaggtgatgtaatggggttatcagggcatttccttgagagtatcccaacagtagcaagtgtggtggtagccacagtggcagaggcagcggtagcagcagctgtagttgcatttacttctgcgtaagtggggttaggaccagagagggaaaagagctagtctttcactctcaggaactttttgtctaatgagggagatcaccaactgcaaataaaattatcccgagggagagattttggcctggtataaataacattctaagtctattcacagttggaaaggttaatgcatttgaaagcaatgtggaagccataaagcattattgatgtggggtagagtgttaggtactagggagtcagacaagaaagacctggtccctatctgtaaggagcttccagtccctggcacagttactctagaatgtgatatgaatgtgtaacagaggggtgtgtgtaggaggcccggtggtggcatgaagaggggagtggttaacttcacctgctgcttcagaaggatttagaagaggtgacatgacctggtttgtaatgaacgagtagaagtttgccaggtaggtaagtgggagagatgcaaatagagtgaagggcatttgtgtgacgttggtggcccccacaatttggggagcaaataacatgcccctgttagtcctcataatttagtgctccaggccccacgtgcagcaatatcaggtctgtggccctctgaggcttcaccctctcccccagatccttgaggttactagtgttgaggggaacttggcgctggctggcagggctcattgcagcaggggactgcagctaatgaggaggagccaggctaggccaggcagttctccctgcagaagccgggcaacgtttgaggcctgtgaaaggaagtggatactggagtgatatcttatcctgggggtatgtcttactccatttgggctgctataacaaaatacctgagacgggataattgataaacaacagaaatctatttctcagtctggaggctaagtccaagatgagggtgctggcaggtttggtgtctggtgagggctgctctcctcttccaagatggtgccttgttgctgtgtcccggcatggagggaggcagaagggcaacctgactgacgggaggagccctcatggcctaatcatcttctaaaggcctaccactaatactgttgcattagagattaaatttcaatataaattgcttgcttgctttttcgttttttagagatgaagttttgctctgttgcccaggctggagttcagtggcacaatcatagctcgctgtagcctggaactcttaggctcaagcaatcctgcctgagcctcccaagtagctggcactacaggcatgcatcaccatacctggctaattataaaaaaaattttttttttttttggtagaaatgagacctccctatgttgccaaggctggtctgaaactcctgggctcaagtaatctgcccaccttggcctcccaaagagctggaatcataggtgtgagccaccgtgcccggcttcaacatagatttcaatataattttgaagagacacattcaaaccatagcggggtgtgtctctaaagcataggctccttgctctccaggaagtatgcccctaactgaattgctcaaaattgcctgcataaactcttggtttttccaccagaccacttccactgggtgctcagctgcctgccctggtgtgggacgtgcacacattctgaccataggcatctgtattcgttccctagggctgctataacaaagtaccacaaactgggtggctccaagcatgtttattgtctcacagtgctgaagaaatctacaaggccatgctccctgtgaggtctgtatggtaatccttccttacctcttcctggcgcctggtggctggctggcaattttttgtgttccttggcctgtgcaggcagcactccaattctccatcctcatatggtgttttccctgtcgcactgtgtcttcacatgtctgcttccctataaggacaccagtcatattggattaggagcccaccctactccagtatgacctcatcttaactgattacacctgcaaggaccctatttccaaataaggttatattcttaggtactgggggctaggggttaggacttcaccatatccttttctgggggacacaattcaatctataatgggttttgtttgtttgtttttgaggcagagtctcactctgtcatccaggctggagtgcagtggcacgatcttggcttactgcaacctccgtcccctgggttcaagtgactctcatgtctcggcctccagagtagctaggattacaggcgcgtgccaccatacccagctaattttttgtatttttttttttagtagcgatggggtttctccatgctggccaggctggtctcgaactccagacctcaggtgatccacccaccttggcttccgaaagtgctgggattacagacgtgagacactgcgcccggcctataatgggttttctgagagatgtggtggtggagctttgagatggcaaagaccagtgctcccagtatttggaggtgctgctcaggggcgacagcgcaggagcatggtgttcacctctttctgcttggtgacccgaggctgcccaggagtatggctgaggggaactggggctctgctggagccacacagagtgatgttgcatctggagggaagggtggagtggagtccctgtcaagggagccattgctgggcctcttccctgctgttcctcaagaaaaggaaactgccagtgtgatgcgcactccagagcattttccttttagaacagagaaggagcggggaatgcatctgactaggtacccagtcttgtttttgtttttcagagttattctggatatttttgcttgcccattaattaaaaaaaccctgttcataattttattgtaatgtcctgaaatttaaagatgagtgaaaggagaattagcatatatatatactttttttttttgagacaggatctcactctgttgcccaggctgagtgcagtggcacaatcatgactgactgcagctttgccctccccaactcaagcaatcctcccgtctcagcctaccaagtagctgggactacaggtacacaccactacacctggctaacatctttaataaaattgagtttttcctaccagatacacagttattcaatctattcaagagtcttttgtgctactcagtagtattttaatgactttttttcttctagttcttgcacactatttgttgtttgctagatcttttctctttgcttgctaatataacaggaatcttttctctcatcttgttatctaatcagttgtgctttgtgttataggaaagctgttgatttttgcataatattcttttgcctagtcactcgcttctctgaattttcttactatttgcagttgttttcagttgattctgttaggttttctaggtttacaataatataatttaatctctttctttttgatatttttaaagagatggggtcttgctgtgtttcccaggcaggagcacagtggctattcataggtgcaatcatagtgcactgcagccttgaactcctggactcaagggatcctcctgcctcagcctccctagtagctgggactataggtgtgcaccactgcacccctgatttttatacattttatttttttctgttgtcaagttccatttgtaaccaaatgtaagtctggctgctcgctgcctgagaagccaaatactcatgaggcgaggtgtggtgaagcaccagcagttgaagaaatggctaggctcattcttccaaaaaaaccatttcaactttttgggctgagtaaagggatttaagaggaaaatgtggtatgggaaatacgtggaaatgtcgggtgcgggttctgcatgtctcgttccgatggctatcttgataatcgcccctccaggggcctggttggcgtcagtctgactttggcctgatggtggtgggctaatcatttgtaaccttcctgcaggaggattctgcagctgggcctctatgcctggtttatttcagaattggtccctggaatttctaagcaagcacataattagataagcaagcacagtgcatgggagtgcctggcgggaaagggaggaaaacaaagagttttaaagtacatttcaaggctatattttgagtttaaagaaaaaaagttttaaaatgcatcttgaagctgagatactcggttacacattgacctattcaatccttccccacccatcaggtaacagtagtgttcttgggcatctttagctagttttttactttactaggaatatatctctattttcccatcaagtatgatgctggctttgattcttctggttagagtcatcctgaatgcatctggtgttgaaattaatctctttttttttttttgagatggagttttcactcttgttgcccaggctggagtgcagtggcgcgatcttcgctcactgcaatctctgcctccctggttcaagcaattctcctgtctcagcctcccgaatagctgggattacaggtatgcgccaccaggcccagctaatttttttatatttttagtagagacggggtttcaccatgttggccaggctggtctcaaactcctgacctcaggtgatccacctgcctcggcctcccaaagtgttgggattacaggtgtgagtcaccatgcctggccaatcattttttaattagaggggatttcttaaaaaactttcttgtcccccttcccacactccatggtttggatttcctatctcttcgaacaatctttcttttcttttcttttcttttcttttttttttttttttgagacaggctctcactttgtcgcccaggctggaatgcagtggcaggatcataactcactgtaacctcaaactcctgggctcaagccatcatcccacctcagcctcccaaagtgctgggaatacaagtgtgagccactgctcctggccaatctgttttttttttttttttttttaaatacagaattacctgttgagatttcagttccttatacagagttgagcaatttttttttatcaatggaggttatttattctcattacttattatttgcatttatgctttttctccttccctgtcccttccctatgcaataatttggttagttgatgctttaatcttttctgatgctctattgcttttcaattttctaatttaataatttctacatttatctttaaaaagtctttctttaggctgggtgcagtggctcacacctgtaatcccagcactttgggaggctgaggtgggtggattatttgagccccggaattcaagaccagcctaggcaacatagcaaaacgccatctctactaaaaatacaaaaaattagcagggtatggtggtgtgcacctgtagtcccagctactcaggaggctgaggtaggaggatcacctgagcccaggaagttgaggctacagtgagcggtgattatgccattgtactccagcctggatgatgagagtgagaccctgccacacacacacacaagtcttttttaagttattttgtggctctttttctaactttttgagttgggtacttaattcatttattttcattttcatatttatgtatgtaattatttaaagctgtaaaatatgtttggttctagtcttctgcagtgtcagttgaaagagctgcttaagtgtttaagaagttctatttagtagagttaaaaaaaaaattgttgtctgggcatggtggctcattcctgtaatctcagagctttaggaggccaaagccggaggatcgcttgagcccaggaggttgaaaccctttctctacaaaaaatacaaaaattagctgggcgtggtggcatgtgcctgtggttccagctactcgggaggctgaggtgggaggatcgcttaagcccaggacttccacactgcagtgagctgtgatggtgccactatactccagcctgagtgacagggtgagatcctgtctcaaaaaaagaaaaattgttactgatttcaagttttattatcttatgacaacagcatgcctttcactctatcaaaattattgagggtttttttttggcctaataatcaattttgataaatattccatgaaccattgaaaagatgtattctttgtttccaaaatatagaatttaatatatatcaattggatcatatgaattatgttacttggatgtatatctttatttttaaaaatgttctagttgatgcataataattatatatatttatggggtacatgtgatattttgatacatgcatacagtatgtattaatcaaatcagggtatttaggatatccattaccttgaacatttattatatctttgttttggaaatatttcaaatcttctcttctagctattttgaaatatacaataaattgttgttaactgtagtcaccctactgtgctattggacactagaacttatttcttctaactgtaggcttttgtccattaaccaacctctgttcattccccacctgcccctgctcttcctagcctctggtaactatcatactgctctctacttccataatatgaacttttttaagctcccatataagtgagaacatgtgatgtttgtctttctgtacctggcttatttcacttaacataatgatgtccagttccatccatgttgctgtgaacaatagaaattcattctttttttatgcttaatagcattcagttgtgtgtaaatacattttccttattcattcatccattgatggacacttagtttgattccatatcttggctattgtgaacagtgcatggagatgcaagtatccctttgatatactgatttcctttcctttggataaatacccagtgatcagattgctggatcacatggtagttctatttttagttttttaaggaacctccatactgttttccataatgtctgtaataatacacattgttactatcagtttataagagttcccttttccctgcatcctcaccaacattcgtgtttttttgtctttttgttaatagccatcctggctggggtgagatgatatgtcattgtggtttttatttgcatttccctaacagttagtgatattgagcatttttttcatatacctgttggccatttctatgtcttcttttgagaaatatctactcagatcctttgtccattttttcatgggattatttgttttatattttgctgttgagttctttatatattctggatattaattccttgttggatgaatagtttgcaaataatttctctcattctacaggttgtctctttactctgttgattgtttcctttgcagtgaaagagctttttactttaatatagtcccatttgtctatttttgtttttgttgcctatgcttttgaagtcttagccatgaaatattttgcctagatccatgtcctgcagcatttcctgtatgttttcttctagtagtatttatagttcctggtcttacatttaagcctttaattcatgttgagttaatttttgtatatggtaaaagatagggtccagtttcattcttctgcgtatggatagccagttttcccagcaccatttattgaagagggtgtcctttccccagtgcatgttcttcatgcctttgttgaaaatcagtcagttggctgtaaatatgtggatttatttctgggttctctattctgtttcgttggtctgtgtgtctgtttttatatcgataccatgctggttttgcttattctagctctgtggtatattttaaagtcaggtagtgtgatgccttcaactttcttctttttgctcaggattgctttggctatttgggatcttttttggtttcagacaaattttacgattattttttctatttctgtgacgaatgtctttggtatttttatagggactgcattgaatctgtatattgttttgggtagtatggtcattttaacaatattaattcttcccatccatgagcaggagatgtctttctgtttgcttgtgccctcttcaatttctttcatcagtgttttgtagttttcttgcagagatctcttacctccttggttaaatttattcctgggtcttttttttttttgtagctattgtaagtgggattgctttctttgcttttttttcccagctagttcattattggcatatagaaatgctgttgatttttataggtttaccttgtatactgcaattttactgacttcgttggtcagttctaagagttttttggtggagtccttaggtttttctatatataagttcatgtcatctgcaaagagcgaaagtttgacatcctctttaatctgaatgccttttatttgtttctcttgcctgattgctctggctaggacgtacagtattattttgaataagagtgggccggatgtagtggcttacacatgtaatcctggcattttgggaagcctaggcaggaggatcacttgagcccaggagtttgagaccagcctgggcaacatagtgagatctcgtctctacaaaaaatcataaaacgaggtgggaagatcacttaagtctgggaggttgaggttgcaatgagttgtgattgtgccactgtactctcacctgagtgacagagtgagatactacctcaaaaaaatagtggtgaaagtggacatccttgtcttattctagttcttagagaaaaggctttcagcttttcctcattcagtatattaggtgtggatttattacatgtgggcctttattatatggaggtatgtttcttttatgcctaatatgttgagagcttttatcatgaaagaatgttggattttaccaaatgccgttttagcatctatggaaataatcatatggtttttggtccttcattctgttaatgtgatgtatattgatttgcatatgttcagccattcttgcatccctgcgataaatcccacttgattatgatgcagtatcttcttgatgtgctgttggacttggtttgattttgttgagggttttttgcctgtatattcatcaggaatattggcctgtagttttcttttttgttgttgttatatccttgtctattaggttggtgcaaaagtaattgtggtttttaccattggaaaaaaaaaaagtcaaataccgcaattacttttgcaccaacctaattttgatatcacagtaatgctggcctcatggaatgagttagagagaattccctgctctttgattttttggaatagtttgagaagaactgatgttagttcttcttaagtgtttgatagaattcagcaggaaagctatccagttctgggtttttctttgttgggagatattttattactgattcaatcctggtatctgttactgctctgttcaggtgttctgtgtcttcccggttcaatcttggtaggtggtaggtgttcaggaatttatccatttcctctaggttttccaattgtgagctttacttatgttttgtcttgctctgtcacaggctgacagaggtaaaataagctcttctcagaataatgtgtgttgattctttcttgtatgtccagtaaactttgttttatatctttgttgctatgttatttgtttactcagatatttattatatcttcattgtaatgtaaacctttattgttataaagtgcctatcttggacacaaatatggaaattacagacactggggactccaaaaggggagagagtgggagggaggcgagcattgaaaatttacctatcaggtacagtgttcaccagttgggtaatgggcctactagatgcccagtccccagcattacacaatataaccacataaaaaatatgcaaatgtacccccgaatctaaaataaaattaaatataataatatagtgcctatatttgtctagtttaataattttccccttgaaatcactattaccaaaaggtaagagtacgacctctactctcttccttttttttaaatttacttggtatacctttgctcattcttttatctttcaaactttctgagttaccttgctttagccatgattcataggctgggaataatctgtacctttggcattttgccagcttaggactagagctgtcctaattagtacccactggcctggggaatttgcctgtttgatggaggtcttttgtttttttttttttttttttttgagaatttgtgtttttgaaaatgtctctatttcactttcattctctcccaccttttctggccctttatttcccaacttttaattgtgaaaattttgaaacaaagagatgctaaaacataaggacaataggctgggcacggcggctcttgcctgtaatcccagcactttgggaggacgtgacaggcagattgcttgaagccaggagtttgagaccagcctggtcaacaaggtgaaaccccatctctactaaaaatacaaaaattatctgggtgtggtggcgtacgcttgtaatttcagctactcgggaggctgaggtacgagaatcacttgaacccaggaggcagatgttgtggtgagccaaaatagtgccgctgcactccagcctgagtgacagagtgagactctgtctcaaaacaaaacaaaacaaaacaaggacaatgaacatctgtaaagcttccacaattgttaacattttgtcatatttgctttatttctccttatatagctatctaggcatatctatctgtttctgtatctgtagtgctgtatcattcaaaagtaagttgtagacatcatggtactctaccttaacactgcagcatgcatctcctaagagtaagaactgctcatgcctataatcccagcacattgggaggccaaggtgggtggattgcttgagctcaggagttcaaaaccagcctgggtaacatggtgaaatcctgtctctacaaaaaatacaaaagttagctggccacgagtgtgcctgtagtgtcagctactcaggaggctgaggtgggaggatcacttgcatccaggagtttgaggcaagatcttatcaacttggacgacagagtgagaccccctgtctcaaaaaaaaaaagagaaagaattgtcttctacataaccacattaccatcatcacacatgaaaattaaccatggtgtaagtcttttcatttttttatatttgagacagggtctccctttgtcacccagtgcagtggcacgatcacagctcgctgcagcctcgacctcccttgctcaagtgaccctcctgcctcagccttctgagtagctgagactacaagtgtgcaacaccacggctggctagtttttgaattttttttttttttgagatggagtcttgctctgttgcccaggttggagtgcaatggcatgatcttggctcactggaacctctgcctcctgggttcaagcgattctcccacgtcagcctcccgagtagctgggattacaggcatgcgccaccatgcccagctaatttttgtattttttttttttttgagacgaagtctcacactgtcgcccagactggtgtgcagtggggcgatcttggctcgctgcagcctccacctcccgggttcaagcgattctcctgcctcagcctcccgagtggctgggactacaggcatgcgccaccacacccagctaatttttgtatttttagtagagacggggtttcactatgttggccaggctggtctcgaactcctgacctcgtgatctgcccacctcagcctcccaaagtgctgggattacaggcgtgagccactgcacccggcctaatttttgtatttttagtagagacagggttttgccacgttggccaagctgatctctaactcctgacctcaggtgatctgcccgccttggcctcccaaagtgctgggattagaggcgtgagccaccatatctggctgtaagtctttttaaactgtgcattccattgctaaattccagactcctggcagtctggaattataagggtgcaagtggtttactggagacagtaatcctatcctgatcatgccctgtctcagaaagataagaacgagggaagagatcataatgggctacaagaatttgaagggctgtcatgtagaagagtgagcagactttgcctttggagttacagaggagagcatttggaatgaagagtgaaagtttcaaggaggcaaattgaacctggaatggggctgccagcctcattcgatggtgagtactctgtgactagagatatccagggaaaatcagatggctccttctctgggatggagtggaggggaattgtgttggataggaactggtctataggacatttaagtttcttccaagaattcttagggggcagggacaagttccggagagacccaaaacaatatacaagttatagtctaattataatggctctagtccattttgtctaccccaaacaaagctgattatccttacatgtgttttaagattgtattttttcctctgctatttgttggctaaccatctcatagctctggtttttggtaaatctagcaaatactctttcttatattttctgttggtttgtagaaagggctaaagaactctgccttctttaaggagggggccggccctttcaatttggtaaaatgttagagatagaaaaaagataagtgaaataaattcgcattctatctctattcctttttgccccagtcctaatgtctgactgggtatcttttttaaaatatatatataactgcaaaataaaaggcctcaggggaaatatcactggaagtaagagtagcttggattgaatttatatctatgtcagataatgtgcttcagtaatagttattttcagaactccatgggagttttttcagtaaactaatgaatgggtgtcactgacaagctttccaaagcggaaattatgtgaaaactcccatcttatgggaaaggctaaacagaggagaaaccctgggcttttgctggtgggggaggggttaatgtcagttctaaagaagattcacattttcattgtttcattgaagccaattcaattttatgcaggaaatggctgaatggaattatatttctaggaagccatacaattaagtagaaagcattagtagttcttgacccagctctgctattaactgccctgggcaagtccctatacctagctacatttccacttcctagacttcaaatgttctatgtacatttaccaatccattgaagataaatgagatagcagtgattacaaatgtcgggtattgaatttgctgccaccttaaagctgtcccaggcctatgggctaaaagtgaaataagaacttccctacttagtataatacttagtataaaaagctcaggaggtcttatccctaaatagataagatgtggagtgaaatcactttaaatagacctgatttataagcagggttaggtttggttagacatggataagataaatgtattgactatgaatgtgttcagctcttgtatcaaggacttggcaagtagtccttggttaacacctgctgctttcaaatttctgaatggcttcccatctgaatctggaagtcctacagcttttctcctccagggcctattcttgacttgcggatgacaaccgttttttttacagccagcttttctgttttgttctgctccctctagaggtcccttcccctacctctgcctctgtccaaatatcttaatagtgatatcaaagaaggcagaagtcaggttttgccatttcacttgaattctgccccagagcctctctcagtttggagcaaagtgtaactgagtgtggtgtaacgaagttctgtggatgatgttgatgatgacgaatagtggggagcgattttcacagccaggagcttggctctcagcttttgtggcgcctcagactcttccctgggatgtgtagtgttccatgctggcagcatgctgtgaacaatgaaaattgtattctgtagtctctttcaatatgctgtgacttggcaagggctgaaagcaaatcatgcacctgcataaccttttcagcttgacaaagaatctctctcactccccctctcgcccctcccttccacaggaaatgctcccagacgacagcacgaacaagccctaattaagtctttcctcagatcccgacgtcttttcctccaaccacatcttgggtttagatgtgtaagtaagaggaaagtggagaaataaaaatcaggtataagacacagctggaaattgggacctatttaattgcaagtaaagcctaagaccccggccctggtggctctttggacagttcacatagaacaagagacagagtaaactgatggaggagttaagatgcttttgatgaaaaaactggttgcaaattatttaagaacattttctcagactttttgcgtttcttatatttgtgtctgtctctgaatagaagaatctcaatgtctttcaggatatttaaggatcatatacgtaaggtgcctcatgcttccttgagaagtctatgaacacatccttacaattatatgcaaaattttgggctttgtttacttatctgaaaaagagaatccacagattttataatgtctccagggagttcaagacccaccgctttccccaaagtttaagaaccactggtattatagaagagaaagaataggtctaaaacaaaatctggaaggatggccacgtcaggaagccacaaagaaagagtggagcctatgaaagttagagaaggatgaaattcccaggcatccccatgggagacagtagggtggtgaagctcatgcactgtggaatcatttcatctgagctcacagtctagtgtctccatctattaactgtgctggctgtgtgccctggggaagttacctctccaagcctcagttttctaatctatacaatgggatgatagtgcctacctcagagttgttgcaaggatgaagtgaggctatccatgtagcatgcctctctgcctccctattggtatgatgtgtgtgtgtgtgtgtgcatgtgttgtctctgcctctacacatgtattttccattttcttgtccactttatgcctctttctgggctgactgaagattcaagaaggctctgaattctgttctgctgtttttttctgatttctttagaaaaataatcagtgtgaggtgatgtccttggctgaatacccccagctccactaggacttgtcttccagccaggctgagagccatgtgtttgagcttttccaaccagggtaaggagcagtagatgttaggagcctcgtgcttagagccaagtgaaccagctttttctgggaaggagagaccaaatcatccctgggaggatagagcctgtcttctgcagtgccccagatagcagcagccttagctgctgcctctgtggcctacttccttttgtaatttgcacaataggccagaagatggggctcttgaccctggagtcaagggccagaggctctgactttttccacatttgtactggagagaagtcagatccaccagtcctcccaggaatcaccactacttctcaattcctttccctaccctacctactccacttctgccatggctgggacttgccttccaggggagtgggggatgtgggcacatctttcctttggccaccatcctcggctcctgaattaccacgttgctagagtcagtctttctgacgccctgcctcaggtttccccctctaatccattctcccctaagggcagattttggagatggtacaatttttataggccaatacaacatagtggtcaagaactctagaatcagagagcttgttcttgactcgtctcctcaggtgaatctttccccacctcctcagagaagctctccctatcccatgccagttactcttgatcacataactctttatttacttaacagtagtgattataactagcggttatcttgtttgatgacttgtttactttctcccacttgattgtaaggcttatgaggccaaggacactgtcttaattgctgttttcccaacacctaacatagggcacgatacataggttctcagcaaaagtgttttgaattaatagatgaatgatggaatcccagcttcatgactgcctgaccttgagtaagttgcttaacttcactgagcctcagttttttacctgtgaaatagaaaaagagtagagacattatgactattaaatgacacaatgcatttataccactaaacccaggttctggtgtgtggaagttttccctaaagccttcagcgtcctgctttttatcatttaagaaaaataaagtctgaatgaattagccagatctccacaatttgatcacagccttttattttatttattttttatttttttgagacagggtctcactctgtcacctcggctggagtggagtggtatactgaagcctctcctgggctcaggtgatcctcccacttcagcttcctgaggggctgggactgcaggtgcatgccaccatgcctggctaatttttttgtattttaaaaatagagatggaatttctacatgttggcccaagttggtcttgaactgttgggttcaagggatccatctgtcttggcctcccaaagtgctgggattacaagtgtgagccaccatgcccagcccacagcctttctctatcacaactattacctcccactgctcttctcaataactttctgctttggcccaaattgtggctaccctgaatgggccatgtgcattattattcttaagtctttgcctaagacttgagatgcttgctcttcttaccttgggtcagctaaatcttacccatgttttcagacttagctcgaatccatgtcctctgtgaaaccttcctgaagatcattttctcttctgaatttttgcaatcttcatggtttatataatattactcattaacatataccctgtttccctgataagcctgttaagctcccttggagatatatattttagatttctctgcctctacagtgttacttgggcctgttcattagtaggtgttcaatacattttttattagattgaattaaaagcattcatatttactaagtactttctatgtgcctgggattggttgaggctctgttgagtatacagaagggcataagaaaaataatcattgctttcaaagaacttataatattttagtaagctaaagtcaacatataaagtacttaaataaccacagcatgacaactgctataagaaaggtatgaagtgccttgagaattctggggagggtgagatgacatctgttaggggtatcagggacagtagaataaagaaaggcttcttggaagagggtggcttttgagattaactttgaaggatggttaagattttgatggacaaaaatggggatgagggtaggatgtgaattccagattcaagatgacaggattagtaaagagattgatggagtgtgtggcaatgaacactaaaacgcagagactagacaggaggcttatacaggacatcagaaatacaattctgcttcagggatactgaagcccaaccttgtttccaatttcaggaccaacacaaaggatggtaagcaggggtggaaagttttaacatgtatcagactaccttccccaactgtagcttctttaggggctgagaattatttgcaacaattcttcccctgaccccaatttggacctacctgaagtctggtatgatagtgcatataaaacaaaaggccccacggccgggtgccatggctcacgcctgtaatcccagcaccttgggtggctgaggcgggcagatcacctgaggtcaggagttccagaccagcctggccaacatggtgaaaccccgtctctactacaaatacaaaaaaatcagccgggcgtggtggtggggacctgtaatcccagctactcaggaggctgaggcaggagaatcgcttgaactggataggcggaggttgcagtgatccaagaacacgccattgcactccagcctgggcaacaagagtgaaacttcgtctccaaaaaaaaaaaaaaaacaaaaaaaacaacaaaaaaaaaacaaaaaaaacccaaaaggtacctttctttttcttgaggagagagggttgcttcgattttagccagcctctcttttcttataaatccaaatcaaatttaatgcattattcatgatattctaaccttgtgttaagtcagtagttctgttgctaaataatagtttgccttagatcatttcctggaaaagttcgaagcctttttgtggaattgcttcaacagtcatccttagctcgaccctgtccgtgtgttttgcttctgacttgagactcaagaagaagacctaagtcatagtgagactgtgagggagcctgacactgcctgccttcttcaatttaatgctctttaatctggccattagctcaaggaaaaacaattaattttagaaggccctctcccctcatccgcaattacctcctcctgcaatcgcgaaggatgtttgcccggaatttaaacatcatctcccaaggaatgaaatcagaataggcaaaaccgacactttcccagttttcaagggtcaggtgcagctgcaaatagaagcagagattttctagcaagcagttggaaggaccttcacgcccagaggcccctgaagggagggaggcggtttccaaggcaaccgggcccgggagcggttggctccccggctcctccccctccccgcggtagcccagggtaccgccggacagcgtcctcccgtgctccgcgccctgattggctgcgcaggcctctcgctgattggttgcggcggatgcctcgcgggccggtggctatggaggcggcggcggttgatggttgaccgttggctccggggtgggggtcgccgttcgagtgatctgctcagacccgaccagagggcgcgggctgctgatgcttggcttggagcccgtgggggagacctagttcggctccgccatgccggccgccgggagtaacgagccggacggcgtcctcagctatcaggtagggccccgcctcccgcgcctcccgctcctccccggggcgcagcctcctcatcctctgcccaccctccttccttctgcccccgagcccaggcttcccaggccgctccctgagggcgaggggaggccagcccgggacaccagggggcgctccgggcggttggggaccaggccagggctgcgagagagtgaccttgggccgaacctgggatctggcccatctctgccgcatcccttgcgccgcccgcccaggagccctgacagccggcgggcggcgacctcttgttctcctcgcgtctttctgttggaaggggccggcgtctggcctcgcgttgtcctgccagaacgtgggcagaaagggtagcagggaccttgctctggtggggcacgtcttctctttgtgtttttatttctgggggtttctggttcctcagtggttcagaggaaaagccagaaaagactctggaggctgggaccaatccctgatagggtgacccggtttgtgactccctctgccccattgaacagacacctgaaaacttctgggtagggactgcaaactgggctgaggatgtgtggaggggtcaggaacaggtgcttatttaagggaattaaaaaaccaaggttaagtaactggtattggaactgttggggcggctaatgtaaggaaaagcattggactaagtgttagagtctgtagtttgaaatcctacctctgcctcacacaaactttgtgaccttgagtaagtcacttgcctctttgaacctcagtttccccagctattaaaatgggaatagttatgtctgctttgcatgcttcacagggttgttttgaggatcagacgaagtgctgtttgtgaaagggctttgtggagtaatgtttattgtgtgacactcagtgaatgagtggcagcccattgaattctcactccccgtttcctgtgcaatcagatggtgtggtttctgccttggaaagagggttggaagaggaggcaagtctgaagtacagggctctgaagagggtaatgggccatctcaggaaggatgacacgtcttggaaacaagtgccatgttgacctcagggatggtttccccgaggaggcagggaaaatatcctgagtttgcaacaaaatgagtatcagacactgactctctcctcttcttcctggttaatagtttgctacaattaatagaagatacatccttctttccttgctctgtctgaaaagaacaatatctaagattttggaaaatgcatatctaacccccttaaagcctattaaatgtattcaatctctgtttgggatacaatggtaagaaaaaataggcaatgttcttgccctcctggagcgtatcatttagtgggggaggggagaagtactatttttaatcaaatatcacacaaataaatatcataaactgtgataaatgctttgaagaaagataggcagtgccataagcgtgtataacagtggttccagacatggtctcagagaagattttgctaaggaagaaaatctgggcaaagagctaaaggatgaataaatgttaactgagggaagagggggatcacagggcctgagaggcaaagagaacagctacacaaaagacctgtggcagagggggacacacctggttagagacctgaaatgaggccagtgtggtgcagcaacaaggagcgatgaggggaatggtatatgagatgtgttctggggttataacacacagggccatttggagcccatgctgaggaagttgacatttatctgaggaacaaggggaagccactgaaggggtttaagtagaggggaaaggggagagagggggtctctcctaaccgggagagagagagagggcatgagagagtaaatgagatcatgaacagattttcttttttttttcttttctttttttttttttttgagatggagtcttgctctgtcgcccaggctggagtgcagtggtgcgatctccactcactacaagctccgtctcccaggttcacgccattctcctgcctcggtctccggagtagctgcgactacaggcgccttccaccacgcccggctaattttttgtatttttagtagagacagggtttcaccgtgttagctaggatggtcttgatctcctgacctcgtgatctgcccgcctcggcctcccaaagtgctgggattacagacgtgagccaccgtgcccggcccagattttcctactgaaagatttctttggctgcagtggggagaataggttggaatggatgtgaggatacagtgtccttaacatgcagaatgtttacaggttatattattgagggcatcatgacccttaggtttctgttagtgttctgtgaaattagtaattcttgagtacttctggagtaggatagaaaatatctcctttatatctagtttgtgaaactttcttgggtggtagggtgaggagaagaaaaggaatacaatgggaacagtaggacctcatgaaggctggagtcaggtaataggcaaatggaaatttgagagatagggaggaaaagagaatgagggtagaaggaggaaaggaaatggggatgacttgggggagagacagtcaactgactggcaatgaccaattaaaccttctatgtgctaactaggctgtgtggagatgggccttgtaaagtgagcagattgtgtaacttgatgtaaacagagaggttccagacatcacctctaaatatcataaggctgtgctgttttggaagatgtgagctactgtcctagccttctaacagttccctctgctttctttcttgcccttctgtaagactactctccacatggcagccacagggaacttttaaaaacacaaatcagatcatgtcacatcttatcttgaaacccttcagtggcttcctggtgccttttagaataaaatccaaactctttatcatggcctaccaagcctgaatacaatcaggctcttgtccaccctcccaggactgcctctcctccactctctttcttgcacctcctctggctttctgtttcttcaatacagtaagtcttgcatacctcaggtgggtcttgtgcctgtcattccctctgcccaggatgctgttttacccaggccttctcatgattcaactagaatgtcacttccttagagtggctttctctgaaccttcatcccagtcactctctttaagatggtcctgttttattttcttataacatatgacttacctgaaatattcttcttttggtttcttgtttattatcatctcagttagaagcttcttgagggcaggggacaagcagaaaatcttctcacctagcacagtgcctggtataaaattggtgctcaattgcataagtgaatgagcagctctcccgtatccaaagccagatgcctccccttaaggagctcaaggtctagtcaggattggcacagagtgacagatggccattacttcattacacaacatctcttccctctatgttgtgcctttgctcaggcgttgaagctggaaaatctttcccctcctctccgccaagaatattccattttaaccttcaaggtctggctccatatcattctattatattcgtcactcactctcccctgctcacaacacctaccaagtactatcttccgtgaaccctgacttgtggaatatacatattcatctctgctgctcacctgacagctccatttgctgttactgttaacttttattgaatgcttgccatgtgccaggcactatgctaagtgtttttcatgcattatctcacttaatgctctctataaccctgagaattatggaactttattattgttttccaaatgagaaaacaaagataataaagaggttaagtaattcttttatttttatttttattttttattttttgagatggagtttcactcttgttgcccaggctggagtgcaatggcatgatctcggctcactgcaacctccaactcccaggttcaagtgattctcctgcctcagcatcccgagtagctgggattacaggcgcctgccaccacccctagctaatttttttgtatttttagtagagatggggtttcaccatgttggccaggctggtctcaaactcctgacttcaggtgatccacctgcctcggcctcccaaagtgctgggattacaggcatgagctactctgccaggcatagagaggttaagtaattctaagtgccagggttgcttgtggccctgccagacccagggctgcatctctgcaaaggatgtgcccttaatcactgtgcattactgtggctgtgtctttgttgcctataacagtacctgtctctgaataagcactcactaagtgtttgggaaggcaggatgggaagagactgcaatgagggaggccagctaggaggccattggtataattcaggatgagttaatgaagacctacattagtcatcattttgatgagatctctgaaggtgtttatggaatttttatttatttttgagacagggtctcactctgttgcccaggctggagtgcagtggtgtgatctcagctcactgcagcgtcgacctcctgggctcaagtgatccttccacttcagcctccctagtagctggaactacagacatgaaccactatgtccagctatttttttttattttaatttttatagagacagagtctcactatgttgcctgggctggtcttgaatccctggtctcaagcgatcctcacccctcggcctcctgaagtgctgggattataggcatgaccaccacgcccagccggttattgaaattttaagagtcaatgagcttttcgtagggggtagtaatagaggaaggaagtcagaaagctttaaggaaagcccctactttggattggaactggggacacctggtatcttcacagttctcctgataagcactttcagaacaagcagaaggaagtgttgaaagagaaaactggtgagattggaactctcagcatttgagccaagtggtgctggggactgaaggaaagttcagggagggtgaaaatggtggatggggaagcaagtgaatttgggcaattaccaaggcttttatgtggatcaggcctgctcagaatggaaaattttgcagaaatcttcacaataataaaccctggtaagtgggtgataattgagaaacatggctgataggagtagagttacaccccatgtcttatgatggacctgaaaaagctctaagacaagagttctgaaggagacctggattctagtgcccagtgactgtggcacatgttggagctcagtaaatatttgctgagcgaatgaatgaatggctctacagggagtgcgtcaacttttctgagggtcatagccagtttatggtaagcagtcagtaaatatttgctcatattatttaacaaaagtatcaactgtagatagcagtttctcctctcactacattgcacatacccctccaccctctcctcacacatactaggtattctttccatgtgagagaattggggaacctgtgggcattctttttatctggttttcccagatctgctagagagcttcagtaggagagatgtgggcagacttgtcaagcagagacttgagcagagaactggggacaattcggactgcaaatttacttccttcaaaatctgtagataatcgtcttagctcatggtttgccttggcagggtagacagggtcatggtagtaatcaggacacagaaaagcaattgtgtctattctaaatctgctgccaggtaacagcaacagatcttagataatggagaggttggttgtttcccataggtagtaacaagtttactggtcctggtcttggtagtcaggaagtcataatatatgtattggttttcaatttctgccataacaaagtaccacatatttgatggcttaaaaaacacaaatttatcctacagttctatagttcagaaatctgatacaggtctcactggactaaaatcaaagtgttggcgggactgtttctttctggaggttctgggagaggatctgtttcctcgccttttccatcttctagagactgcctgcattccttggctcatagttcccttcctccatctccaaagccagaaacatagcatctctcagaacctgcttttgtcatcacatttttctctgactctagtcttctgtctctctctttcacgttaaggatccttgttattacactgagattacataatggttttcataatttaggatgatctccttattgtaagatcagctgattagcaaccttacctccgtctccaaccttaattcctctttgccattataagggaacatattcacaaactctagggattaggatgtgcatctctttagaggactattaatctatcacagtgtaacctatactgaacaggagtgactccaagtggggttcagcaaaagaatcactgagaagccagagccattttggaattttaggcccctagcaggctgctgaagggttagaatgggaagctcatgggtattcaggagctcatggccactgagaagaggaagtctggaacagctgcatgagtccttgtggaattttttttttgtggctatagggtgttttcattcagtaagaaagtatttgagggcattggagagttggggacccgtgggtcagatttggtgatggactccccaaagggccagcattctgaggctctgctggatgaagaggaagatggaagtgaataaggagatgaagaactattggaggtctggtcagtaaagggcagtttggggtgcagggttctggagcgccaaggatttaagaaggtaataatgtggatcttaagctattcttactgtgggcattaatccatgattagtccatctgactaaatggtgaggttctttgcttttggcaatcttagcatactgacttactaatgttagtaaggaacacagacttgattagagttcttatctcacttagcttttgtgagatcttagcctcaatttagaactgttttgaggattaagtgaggcaacatatgtaaaacacaatgtgaggtatataagtgtattacctcggtttgctgattagaaaccttggaaatgggccaggcgcggtggctcacgcctgtaatcccagcactttgggaggccgaggtgggaggatcacaaggtcaggagatcgagaccatcctggctaacaaggtgaaaccccatctctactaaaaatacaaaaaaaaattagccgggtgtggtggcgggcgcctgtagtcccacctactcgggaggctgaggcaggagaatggcatgaacctgggaggcagagcttgtagtgagccaagatggcgccactgcactccagcctgggcgacagagcgagactccgcctcaaaaaaaaaaaaaaaaaagaaaccctggaaatggctgggtgtggtggctcacacctgtaatcccagcaccttgggaggccgaggtgggtggatcacgaggtcaggagatagagaccatcctagcgaacatggcgaaacccagtctctactaaaaatacaaaaattagctgggcgtggtggtgcgtgcttgtagtcccagctactcggcaggctgaagcaggacaattgtttgaacccaggagacagaggttgcgatgagctgagatggcgcctctgcactccagcctggtgacagagcgagactctgtctcaaaacaaacaaacaaacaaaaaactctggaaatcatctctatatttattgattttgaaatggttgaatgtattagaactcaataaacacttgacttttttggggggggtcttggcagggatagtggtgggagtgaagtagaatgttaatgtatgtactctctgaaaacactgaaaaagatgaaagggttctttgaggtaaaaagtctgagacctactgcaggaaaggaggtgggattcatttgggcaggtccaccaccacgcaggtccagagaggagcctcaggggaagtgtgttaagagagagagcttgaggtgggctctgctccccaccttccctgttccctgtagcctctgtggctgcttccaggagctggggccattatgtaagactgagctctgcccgtgccttttaatttccatttactgtaagtgagaatctggtctgctactcagttataattcattcatttttcaaggctcatgacaatgctttctttctcaagccttgccttgcaatttcagcattttaatgtgtatttaaccctcttagttctttttatctatctagtccttgaggtaggcactcaagtcaattcacatttacgtagtgggtcattatcagtgaactaagaggaagttcagaaaagaggatactcagaaatagggctttttccttcctttcttccttccttcctttcctttttcttaagcttatataatgtgtttctcaggattctaatcttttctgagtcacaagcccctgtgagagaatctgatgaaagttatggaccctctcccaagaaaagtgcacattcacacatattcccacagatcctctgaagcccatttacaagcaccctagaaatccatggaccacaattgagagatcttttttgccataaataaatgatactatcagaggaaataatagccaattggtgaggaatctgcagcaagcacaggccaaagagacctgatgttcctttcttttcatttttaatgatttcaaacaaactttgtatgtgcctgaaatttatggaacatttcaagcatatagcaaagtagagagattttgcatagtgaatcatcatgtacccatgacttggcgtcaacaatgaacacaccatctgtttttttttttttttttttttttttttggttggtttttttttgagacagggtctttctccgttggccatgctggagttcagcgtacaaacacggctcattagagcctccaactcctgggctcgagcaattcttccacctgagcctccagagtagctgggactacaagcccataccaccacacccagctaatttttgaatttgttgtagggacgaggtttcactatgttgcccaggctggtctcgaactcccagcctcaaacgatcctcccacctcagccttccaaagctctggggttataggcatgagttgcagagcctggccacacaatcttgtttcatctatgttcatctattctccaaatctcagacatattatttcatgagtaaaaatttcagtgtgtagccctaaagattaaagactcttttaaaacaacgacataactgccaaaacacacgagattattatactgaaaaaatagtttcctaatataatcaaattttcatttagttgtttacatttatgtgagtaccttgtagttttttaaaaaatacttgttttatttgaatcaggattcaaacaaagtccacacattcacattcaagcctgacctttcaaatgcttttgctaatggttattgacagtggctctgttttctttggcaagacaaagaaaatggatgaacaattattcagtgaatttaggctgtggttaaccaatctaaattaaggaaactaacaaacagcaagaaagtttttcaacctgaatttttcagatgattgaccttgctctttatattttgcagttacaattttaaagaaatcaatcatctctcctaccctccctccctctgtttctctagattcccactgtgttctctgtggtgtcaggtgtctgaagacagtaccaagtattataattaattgattcctatcctctggatattaaaaaccagtaggggagccaacatgaataattattcatatatctaattatttatttatatagttttatgagaaaacatctgatcaattatcaaagagtttataaaactaataaacattcattgaaatgtatgggatacttaccatgtactggacattgtactgggtgctgggtagatattgatgaatataagacccagtacctatcctcctagaacttttgaggggacagaatctggattttgctgattgtattcccatggtgttgtttttcaaggaactctgttttattgtactttcagtaaattggtatttggatttagaggcttgatcagattcagggacaatttatttggtaagattacctcatgggtggtgatatggtctcccattaggaggcatacaatgtctgattgtctctcctttgtgatgttagtggctgttgaaaatcagtacaatccattggggattgcaaaatgattttgttccatcattcccttttcatttagtctctcccataatgagaagcttttctcatctactctgtggtaccactctatggtataatttatctaggaaagcccagataaattatttgccagttttcaaagtaatgagttggtttattagtgttatcctccaaatgtgaccaattagttaattttaaaagtgaccttgtgaagccaggcgtggtggctcgcgcctgtaatcctagcactttgggaggctgaggagggaggatcacttgagcttaggagttcgagaccagcctgggcaacatagtgagaccgcccgccccaactccgccacctctctattttaaaaataaataaataaacaaataaaataaaagtgaccttatgaagtgaactcatcaatcttaacatattgacatggtcaatctgttgtaggcattaccctactgatgctcaaattgtcctattttttggcaagagacccctttaaattggctcctgagtcctttggacacaatcctagttgtcttcgagtgcttccttactatctaacataataagatgttttagacttaccttgtacatttcctggctgggacctatgaccagccatttctccagggagctctgattccttttattacaaaatggtattttaagagactataatgtaggtactaattatactcattgctactgattgatcattttttctaagcctttgagtgggcagagctagaaaatataaatttgtaaatttaaaaacattaaaaataaaaacgcattgtatattattgttgatacttccaattcaatttaggactgcatggctcttatttaccttttgtcttaaaactgtatctcctttctctcttgccgagaatcccagtcctcagccgcactgggagtgacagaataaattcacatagctactcatttgttttatctcacaacacacaacaagcctcagaataccaacaccaaccctacaaccaacaataggataaccaaaaaacagtttcagatcttttaaaattcttctttgtccttagagtatatgccactgaggatgttcagtcaggttactatgttttaatgttacttagaataatttctcttggaatttataccatcaatttgacctttgttttcattttgtttttgattttggggaattactttaaaatttttaattttacattatgtaaattatttacaaaataaggcatattcaaaaaagtctagtttctatctttgtctcttccatcttattccctccctcctctctaggtaactatttaaaaaaatcttttgtgactttttcttcttttatttgttatttatttatttatttagttagttagttagttatttgagatggagtctcactctgtcatccaggctggagtgcaatggcgtaatcttggctcactgcaatctctgcctcctaggttcaagtgattctcctgcctcagcctcccaagtagctgggattataggcgtgcaccaccacacccggctaatttttgtatttttagtagagatggggtttcaccatgttggccaggctggtctcgaactcctgacctcaagtgatccacctgccttgggctcccaaagtgctgggattataggcatgagccactgcagtcatcctatttgttttaaaatgtaagcaaacacttatgttccaacaccctttgttagataaaaggtagcaaattatacagttttctccatcttgctttttaaacttaatattatattttggagatttttccatggtagtaataatatataattttaaatgtctataaagctaatttaatacataaaaatcctaagtagatattagactattttatttacttccctaaaagtttgtttattccagttggcctcaaaaactttatttcaatcttcccattgggaaaatgaattgccttatgttcagagttgtcttatttgggagcatagatgataactacaaaatagtaactttggaacagtaagctggaaacttgagcaggatctagaaggaaggtgatatcgtttggctatttgtccccaccaaatatgttgaaatgtaatccccaatgttggagatggggtctggtgggagatgtttgggtcatggaggcagatgcctcatgaatgtcttggtgccatcctcacagtaatgagtgagttcttgctctgagttcacccaagatctggttgtttaaaagagtctgggccctcccctctctcttgcccccatcttgccatattatacaccagcttcccttttgccttctgccatgattgtgagcttcctgactctcttaccagaagcagatgctagcaccacacttcctgtacagcctgcagaactgtgagccaagataaacctattttcttaataaattacccagtctcaggtattccattatagcaatgcaaatggactaatacaggagacgtggggatttaatgtgctggagagtttggggaaatggcatgttagatgactagatgacctgacaatatgagcaaagacataaaggtgggaatgtgcacagtgctctcgggatcagtcagcttggctggagttgcaggtttgagaagggaaatagattgccagggaaatcagctaagagtttttttgaaataattcagggtcttgtgattcagggtattgataggataggtgccattatattcattcttttaaaacgtttaatttttattttgaaattgacaagtaatatttaagtaatattgtacatattcattggggtgcatggtgatgtttcaatacatgtaatgtatagtgatcagatcagagtaattagcatatctatcatttaaaacatttattatttctttgtgttgagattactcaatatcttccttctagctgtttgaaactctatattatagtcatcctactatagtatagaacactagaacttattcttcctatatagttgtaattttttatcctttagcaaatctctccctacacttctcccccttgccttcctagcctctaatattctctcttatacttcttacttctctgagatcaactttttttagcttccacatatgagtgagaacatgcagtgtttaactttctgttcctggcttatttcacttaacataatgtccttcagttccatccatattgccacaaatgacaagatttcatactttttatggctgaatagtattctgctgtgtatatatgccatattttctttatccattcatctgttgttggacacctaggatgattccatatcttggctattatgaatagtgctgcgataaacgtggggatgcagatgtctctttaatatagtgatttcctttcctttggataaatgcccagtagtgagattactggattatatggtggttctgtttgtagttttttgaggaacctccactgttctccacagtggctgtactagtttatattcccaccaacagtgtataagggttctttcttcttcatatccttgccagcatttgttatattttgtctttttgataatagccatcctaactggagtgagatgatacctcattttggttttgatttgcatttccctgatgattagtgatgttgagcattttttcatatatttgttgactatttgtttgtcttttgagaattgtgtattcattcttttaacaaagatttatagagcactgttatgtgaaaagtctgtgctgggtgctaggatacagtggtgaggaagatggacatagttccttcttcctcaaggaacagaggagactttttttattttttttgagacagagtctcgctctgttgcccatgctggagtacaatggtgcgatctcagctcactgcaacctctgcctcccaggttcaagtgattctcctgcctcagcctcctgagtagctggcactacaggcacgcaccaccacacccagataatttttttatttttagtagagatggggtttcaccatgttggtcaggccagtcttgaactcctgacctcaggtgatcacctgccttggcctcccaaagtgttgggattacaggtgtgagccaccatgcccggccaagacattttattactaagagaattgcagtgtgctatgagggtatataaatggtggacctagcttagtttggaagtcggagtgggtaatcaggaaaggcttccaagtaagtgtgttgaggctgagatcaaagagatcatcatctctttgatcatcatcaaaggtgggggcaggtggtgggagtggcagggagagaatggtagttccaggaagagacagcagcactaagtaaagaaggtgggtgtggttccagaactaaaaaaaaaaagaaagaaatgcctaatatgatttaaagggttggagcatgtagggaagagtggatgagagatgaaaattaattttttagagaaattgcaaaggaagaaagacttggtaagaaaagggaactagctacctgaaggcatatggtaggcactcatacatgtggaatggatgaataagtaactttgaaatttcacctgtgggctaataaatgatggtgccattggtaggaataaacaaatgagcacagggtgttagttttggaaggaaagttagttgggttttagacacatggttcttgaggtgtggcatcctagtggcttatcaattactgaaccacagtttcagactgcagttgaaattgtaagtcttaagtgaggaaaacaaagagtagagagctctttcttggaaattatggttagaggaagaaaaagactaaggatgagacagaggaggcctgataagaggagcaggatggaaaatttcaaggacagcgtgtggtaaacaggcccaaatgctgcaaagaggccaaggagaccaatctacaccaaatgggacaacttgcttcacagcacttgcaaaatgccaaaatgttatacagaggtatagatggagtggggaggtggaaaaggcatgagatttacagccacaagacctgggctcatgacacgtcctagtaatcccagctgctctggaggctgaggtaggagaattgtttgagcccaggagttcaaggctgcagtgagctatgattgtatcactgcaatatagcctgggtgacccattctctctctgtttttttttttttttaaaagacctaggctcagtcctagctccgccttttatgacatttgtgaccctgggccatcattacttaatgttctctgagtgtcagtctgctcatttataaaatgagaaagataatggctaccatatttgcatctaaaaggtattgtgaagttcacatgtaaaaatacaggtaaacaattgtgtttcccccgtaagtatctcaaaaggatctggcatacacaaggtttgtatatttgaacgaggtatgtgtattactgtgactacttatttgtgtttaaacagagaccagatgaagaagctgtggtggatcagggtgggaccagtacaattctcaacattcactatgaaaaagaagagctggaaggtaagaactgccatgctgtgtgatcagggaaattggtgaggggcagcctggtgtgggaagacctggctctgtgtcctaactctctcactagctgtcagaccttggggaaaatcacttgatttcctttagcctcactttcctcatctggtaaataaaagtggggatactaatacttgtcctaccttacagggatatcattaggatctaattgcctacatgggagatagtgctttgaacacggtgaagtccaatataaatattaacaagtaacctgttctttgagaatgtgatgtactcagttcagtgcgttaattcttgacaactgcctggaaatacaaataaatacaaaacttaaagagaaaataaaatacaaatagttttaaaaactcattttggctacaaaaccctatttttaccccatttccaatatttactgtttctattctatttatacccatttctgcctggtggtttcatctaaacaagagggaaaacaggaacacacctgtgacatactcttgagttcataacatcaaagttatataaaagcccagctgaaggggaaaggaaagaagaggcattttggatgacccactctgtccagtttaccttatttcagctcttcctttctctgcacctcacccccagctccccacataaccgttatgtggtgtcctgctttcctttttcccctggggactagttggtgtgttaggagttggacccacacctggccatggttttctaattagtgttgatgctcagtttcattagaggaaggctcatgtccagtatccaatatagctttaatgagaagccacatttggctcaaaagcctttgtgaaatctctgcagcatcccctgcaatgttgaaggctatgatacagcaactttctgatgcctgagacagcatgtgaaatgttctctctgtactgcctgttcccgtgacagttttttcatcaaagttgtacaacctccagagaaaacttgtccttttgatggggagaacggaagctgtagaggctgactcagcctctgggtctgttaccatgagaactgacgtgggtggctctgtggaggtcagtggtgtttgggtataccaaggtgaagttttccaagttattttgaccagatggaagaagagaacatgtgagttgcagcagttgggagggagtgggagaaggaaagggtgtggaatggaaggctaacatttgttgaatgccccttgtgtgttaggcattagattaggcaccttatacaagttgtccttttcatcttcatagcaccccaggcaggtaggtatcattatccctattttacacatgaggaaactgctcaaggtcatcgagcctaattgcaggtgaggctggggagagaatcctgctcttttcattctgccacacagcctgcaagagaggacagtaactgtcattaaccacccaacctcaatatcttgctccatcaaataaaatttttgtatgttgctcttgcctcttcttctgttctgataatcatgtggtctctctaccctctcattgcatcctgggggcatgttgctgtcagtttagttgttctatagcaagcaccactggacctttgccctcagcaaggaggtaaccatttatgaacactcttgtctacttgggagtagaataagaaacctgagcaagctctcttgaatcttaacaactggttccatccacggagatcagctgagtaactggcggtgggagcagcttctccagatgacatcatctgttctttatgcatgttctactttgctaaaaaagaatgctgtctgtgatgacagccttactagtgcatagtgtgttgggagatggtcctttgtacgtagacttttttgaaaactagaatcttatttatgttaacacttaaaaaaaaagcattacacgcaaatggtggacaaactagaaccagatctcaggcctgatgtggtttctagaccagctctggagaagagaagagagagttgggatttgctatagggttggctgtgctgtgggttccactcagactcactccgaagggcagccctaggactcaatgaggctgtactcagggtagtgttatctcttgaaggcatagaataaaacgagtaccattttgatggaacacagaagcaaattgtgttcagattcaatatgcatgccatgatatcaggttctgtggctgcaaaaaaaatctccaggtcttttttcccctttatgtcataacttctgcccacatgacataaactataaatcattgccttaccacattttatttatttatattaaacaacaacctctagtccaagaatatgagttttttgtttttgtttgattgttttttgaggcagtcttgctctgtcacacaggctggagtgcagtgacccagtcttagcccactgtagccttgacctcctgggctcaagtgatcctcccaccccagcctcccaagtagctggggctacaggcacgtgccaccatgcctggctatccttaccccattttaagaactatttctgagatttagtctgtgtacattgttagaaactttgtaagtgtgggtcttttgcataaattaattctatcagtaagagaagttgcattaagccattatgttgctttttttttaatatgtgagaagagtcaaaagccaacatcagaacacgttccaaagatgaactcaagaagagcaatagtccatgatgtgcttcagtggactttcccagtcccagaggaacaagaggcagttgctttagttagagggatggctttttccattttttcctggcagatcattattcctgattaactactagattaatgaactctggagtgagtttaaggccttctaatacgtttttaacagaggtaagagccatttggtcatatttataacttctaaaaaggcttacatctgctcgacatgtgagattcacctctgcagttattgactttgagttaacctgtaagcccagaggagccgagcaccctgttgtatgtgctaatgagctctgtgtgagtgctgggtaagcagtgtgcgtgtactgcattgtaccttagtaggcccaatctccatctgcagggtacgtcaaacctatggttcctgtcctgcttcacatgattcattgccagttcactaaagattgctctctgcatgtgtatatgtacttattttttaaactatagactaaaattacatctttcccataatttttactaaattagaatactttatttgcacacagatagttccaaaagactaggtttgaccttttttggaaaaaagaatgacgagttagatgggaaaaaaatgggatttgtgcgagttggtaggtagaagacgggggcaaagagcggttgaatggccaacaaagtgaccacagaattagtttaatgaagtcactgggtggccagaatccagttagatggactggattttattggtgctatattcatttcctagtgtctgtttgtcatcttttctgccaatttttctcagaaaatccaaatccttgctttagaactcccagactagaaactgatgcctgattttctgacagccgcttggtccttcttagctctgaccccctgccgaacttgatttcatttctgcctgtctctctgatattttcaaaagacaggcattgcgattggctaatgttcgtgataattgattgtactaaagtaagatttaccttacttcctacagaaccattcaaggcatctataggatgtcttcaccattatgcctcaaacctacatagtgggaatttagataccaagcaaaaccatatattattcactcagcaaacatttactaagccccttctgtagtccctttctgcagtaataagtcaggacagtgagaacaattgaaccatcgtgtcttttctgaagaataacctagcctgaaactttcataggactcgaacattagaacctggactagccatcatctggacaagcctgggaagtcatttggtctggcctccttgttttactttaatagtgacagtgagtaatttaaaccaataacatgaaatctaataatgcagtttctaatatccaatcactgcctcctcaatttctcctttaaaattaaataatactagcagtataccagcatgagcccagtggaagtatttggaatgggctcaaggagcaaggagaagtagaggttctagcctggctagtaatcctttgcggggtttgtagggaagaggaaacccatggttgggatggctgtattgaagaactgaaagtcacctctcactgaggctgttcttaacctaagtccagctctatctagctgtactagattttacaacaccaggtcatcattttagaggccaaagtggttgtttagttttaaattttgttttgttttgttttgaggcagggtctcactctgtcgcccagactgagtgcagtagtgcgatcatggctcaccacagcctccacctcctgggctcaagtgacctcccacctcagcctcccaatagctgggactacaggcatgcaccaccatgcctggctaattttttattttttatagaggtggaatcttgctgtgttgctcaggctggtttcaaactactgaatgcaagtgatcctccttccttagcctcccagagtgttgagataacaggtgtgggccgctgtgcctggccagaagtggttgttcaggatcgaattatgctttttacagcacatagattcttcatgacctgcccctgcctgtttttctgtccttgtacatctcctttccttcccttttctaccctgccctggccctactggccatccttttgccccagaaccagctctgcacattcccaccttaggacctgtgcacttgatcttcccccttcttggaatactcttctcccaggtcttctcatggcctctccttcttatcacttagatgtcccctctaatcatcttaaagtctcccttctccatcctaccccttaccctagacacgctagcattttaccttatttggttcatagtaataatcaatatttaaatgatatatttttgttttcatttctgaccccccccaagcagaatatgtgtcctgaagactttgttctgttcactattgtatccccagcccttgggacaggatctggcacaattacttgactctagtctgctgctaatgccacctgggttggtctcagtagtgtgctacagggatttcattaacatactataatggaacataatgagttaacaaattgtattttattaagatggtattcaatttagtattttcacgctatatgctttttatagtttatactgataatgtcagggtctggaatcccacatcttagcagatgacctcctctggctctatatttctgtttctatgaagttgcaagatgactacattatgttcagagatctgcctgttaaaaatgacctgagatatacacgaggcaacagagaactctcctgagacaggagggtaagaagtgcgattccaccagatactaaacattttatcctcctgcctcttaacattctagcagatctctgatcatcttatcctctaatccttactgtttgttttttattttgctttatcactttggaatttggaaaacagagagggcaaataaaaggagagacaaatagagaaaggtgttagaatggcatccaaggcactttaacctgacttggaagtggagggcactatcaaggaagttgagtgcagccttaggaaaccccattgctgggaaaagaagaagataaagagttggcaactcttcccaccaagtctccttctcggggaagtcttcctgatgaagctctccattctcaggtcagttaggactttatcaacctccccatgccctggtgagtactttatttgtcctaaacacattcactttggttacatgttctttttgtggcccctttcaggtcagagtcagaggccctcttaggtgagattatgtactcctgaggaggtcctaagggcttatgctcttcagggaggtacttaggaggtattttatttgctgaacatttatggaacaatgaccatgtgtgaaacactgtgcttgattatgtaggcattctgagagaaacgtctaacttgggacaccaaggagattgcaagagaagagtgcagaataagagagatagctgcttaactttaacgcaaaatagaaaaataagtacatgagaacagcactaaccaagggtgctgggaatctgcctgcctgcctgtctgtctgtctgtctgtctatctatctgtctatctatctatctatctatctagagatagggtctcattctgtcacccaggctggagtgcggtggtaatgatcatagctcataagctcatgcagctttgaactcctgggctcaggcaatcctaccacttcagccttccaaatagctaggactataggtgcacaccaccacacctgtctaattttttttttttttacaccttttgtggagatgaggtctcactaagttgcccaagctggtctcaaactcctggccttaaacagtcttcctgccttggcctcccaaagtgttgggattacaggtttgagccactgtgcctggcctggcactgggaatttaaaggaatgaggcagcacatctgatgggggaaatcagaaaaaataccaagaaggaagatgcatctgcagtgcatcttgaataagtgagccaagccagtgtccagaaagcactggcacatttgtggaatggcagtttgattctggtagagaaaagagtatgaggtgatggtgggtacagcagtcaaggccatgaagaggagatggagtcaaaaccaggccatttggttgctgaggtacatggcagttatacatctctagatatttcccccccagaatgttgattctctgtgagcatgtgggatttccacttttttttttttttttttttgagtcagagtctcgctctgtcacccaggctggagtgcagtggcgcgatctctgctcactgcaacctccgccgcccaggttcatgccattctcctgcctcagcctcctaagtagctgggactacaggcacccaccaccatgcccagctaattttttgtattttttttagtggagacggggtttcaccatgttagccaggattgtcttgatctcctgaccttgtgatccgcctgcctcggcctcccaaagtgctgggactacaggcgtgagccaccacgtccggctgggatttccactttttatttctcttgaacttgttattcagttcttgagaggtctttcattttattttcccactgaatgtataattggtattaaaagaagaaaagattaaaaaggagattgagtactgagcatgaaggtcctgaattcatatgggtgagccatgatcagagatgtaactaggaggatttgtttgcagggttaatttaatgtgagaggcaggaaggggcccctgctttgttaaagtgggagttttgatggccctaatctatagaaagtacggtgagggagaaagggaatggagttgaaaatctaaggtaacgctcggtttcaagcctaggaaattgagagaatgacaaggccatgaacagaaacatggaatgagtataagaccgatttgagatggaggatggtgagtttgctttgtgacatgttcaatcattgtagatagagatttgaaggtcatttgtagaagtgaattttgaaaacagaagagtgtttagcactaaaaaggaagaaaagggccaaggacagaaacttgaggagctttcctttggtggcttgttgggggatggagcagcacagtcagagtagtgcaagtgaaccaggggagggcagtggcaccggagctcagggagcccagagcacccaagtggtttggatactgcctgcaacgtggtgggctctcaagaaagtcttttgaactaagctgagagagatgtaagatgatagagatttggtgaatgagtggtgtggtgtccctaatgagggaagcttcagcagagactggggtcagaagccatatgcagaggctgtggaacaaggaagtggtgaggaaagggagttaggttgtgactgtttttggaagtggtttgataaagaaggaaagaggaaacagcagaagcttgggtgggtagcactgcttgggaaggtttctttttaagaagtcaggagaaacctatggcagggatggatggaaaggagagactgaggataacagaagcaacaggataccagaggggtgggagacaatgggatagagtcatactcattaacatacccagcttggcagaggagagcaagccagactgaggaagagaagaacttcttccatctcttctcaggaaaaactgaagtgagggctgggtgcagtgattcacacctgtaatcccagtactttgggaggccaaggcaggagaatcgcttgagctcaggagtttgaaacaagcctgggcaacatggcaggacttgtctctactaaaaatcaaaaaaattagctgggcgtggtggtacacgcctgtggtcccagctacatgggaggatcacttgaacttgggaattcaaggctaccatgagtggtgatcataacaccacactccagcctgggcaacagagtgagaccctatctaaaaaagaaaggaaaaaaaaaaaaactgatgcaaagtcacctgctctcagcaggaaggaatgtggataaggttgtggatttgaagacagtggctaaggattagaacagctcctttggtggaagatgtggggaatgggtctgagatctagagtgctgagcagcagtaaccaggcagaaatgggagaagaccaaggcatggtgcattgggcatgggagcatcagcagccccaaattctgggctccaggtttggcaggaaggcaagggaaagccaggtagaggtgacagagatctggaaatctggatcaaaacaaaagcaggcttatagaaggaatgaggccagatgtggtgactcatgcctgtaaacccagtgctttcgaggtggagacagtaggattgcttggggcaatcagcttgggcaacgtggcgagaccccatctctacaaaaaattgaaaaattagctgggtgtggtggtgcacacatgtattcctagctacttgggagactgaggtgggaggattgcttgagcccaggagttcaaggctacagtaagatatgaccaggctactgccctctagcctgggtgacagagtgagatactgtctcaagaagaaaaagaagaaataggagcagaggaactagggagggaacactattgggtcacttattttctcatgttcccctctctttgtacagtatttaatgtctttttttaaccttagcctcaccctcctcatgacttacaactagtctcttttagtactgttctagattgtgtatgctacaatgtagaaaataaaataatggaagctgatcctaggatgaatacatcctaggctgctacaatttattccaggcatgtgttaagcattttgcatgcataaccttatttactgcttatgaaaactctgagtttaaatactaagcttttaatatttcttcttaaagatgagtcacagagagattagataaattgttcaaggtcacatggcaagtgaatgatggaattgagttttggacccaggtgggctgatttgagccttacctgtgctcttaacgacttttctaaactgcctccctgccaagacctgccacacttgtcatagagcaactgtattgccttttaaaaaaatcactcagtcaaattgtcattgtcattgtcataacaataacatctgaatcagcctttacagtttggaaatcacattatttctttcagtcttcacaagatccctgtgaagtttgcaggcatgtgcaggacaaaggaagagaccttcaactccaaaatctctatatctttactcctggaagtctttgaagttttgttgttccagagctgtgaccagaccaaagaactgtgatatttttttctcttaactatgctaggctttttgttgttgttgttttttaaaactaaaggagttctctccacagaccttctgcttctttccaggtcacagaactctgtatgtgggagttcggatgccgcttggccggcagagccatcggcatcaccgcactcatggccagaagcaccggagacgagggcggggcaaaggagccagccagggggaggaaggcctggaagccctggcccacggtaagggccttgggagacagggcgggtgtccatggcccaggggaatggggaggctgaggggacatgtgactgacattagcagctggtcttgattcttgagcctttttgtaggatttccaaagcttgcttctaagaagaaatgcctctaagagtcaaaaatattttcgtgaaaacttcacagttccgggcggctgggactacaggcgcccgccaccacgccgggctaattttttgtatttttggtagagaccgggtttcactgtgttagcctggacggtctggatctcctgaccttgtgatccggtctcgatatcctgacctcgtgatccgcctgccttgacctcccaaggtactgggattgcaggcgtgagccaccgcacccggccactgtttttaaattttaaaatatacaattaaattgttatttactatagggttatttttatggtcataatacaaattatatgtgagtataaataaaattcatttctaaactcttaatattttttcaaaattgttatatatttttgtttgaacatgtggcctgtctgcctgcaaacacacagactttttgattcacatagagttaaatatatattagtctaaagacaaactttaggtgtaagaaaattatggaataagtgtgtgtgtgtgagtatgagtttgtacctattttcagaagaaaagaacaatatgggaatgaaaatcattttaataaggtggctactataaaaccaaaaacctaaaaactgaaagcaaatgtaaaaaaaaaaaagaaaagaaaacttcacagttctgaccccctaaaatcaatactataataggtaaaaccccttgctagagaattagccaatctttttgatcaaattcatcagttttccagtttctcgtgggttttcttcaagtggtcttcattcataaatttttcctcccatgaaactacttctacagagtagctttttctctgagaataaagaaatctttttcttctgcattcgtggttgtctatatatatttctaaagttgttaggtaaggaagaatgctatttctgttctaagtgtgaggctagagcagacctttctctttggttgatttcctagacacaccatctcagcgtgttcagttcattcttggcaccgaggaagatgaagagcatgtgcctcatgagctgtttacagagctggatgagatctgtatgaaagagggagaagatgctgagtggaaggaaacagccaggtgaggccctaaaatggcctgcatcaagatctgcttgggtaggcaagtgtgtacccttcagcaagtgacaggcctgcctgccttatttcttcttgggagaagctgtgactgacatggggactgacattccagtgtctcctgtggagaattttggtgttggcatctttatgatgtctttggtgttacctatgccagttgacctggagcatgggattggtgaaataacatgggatattcaggggggcccctctcatttgtttggggctcagagtaagtttatgggctatcttggtattattataggtctgacttagaagatgtagacagggccaccttggtggggacctagtttagcagacatagcataggtccagacttcttctgcaggtgaaccacagggttcaaattcaccagcagtcacagagtttttgagactttaacttcctctgggacaattcaagctatctagagacccttgggattatatccagcctgactgtaggcttcctgaagtggttgtagaataattatgcttctctgagactcaaatcccagaagagccctcaggataaccaaggacatgtctagggtcctctagtaactgaccagtgaaccttacggatgatgcctgagctttggggaaggagcgagatgggtaattagcaaagcatggcttcagctctcactgaaacagctcttgctgggtgcctgctgtattgtgaatgttatgggctgagagattcaaacaggccaattgacctggtaccaagtgaaaaggcaattagtcttttgttattccatcttggcaaacttctaaaggtcacacaggacaatgataaaaagaaaaatatcattttattaatgtggtttgtcagtgtatccaaatgatatagattaaatctatttttttaattgtacaggtaatgcatgctcattatagaaagtttaagaataaagataagcaaaaagaagaaaaaaattatctgtaattccacaactgcagggttaatgaggaatataatatttggtgtcttatacatgtatgtatttgacttttagaattttctttaaataagaatggaattaaactatactcaatcttgcagtgttctattacctgcttttttcacttatcaatgtaccctgaacatacagattagattttacaatgttcagtatgactatccagatatcttcctctgtggctcacatcgaagattctctcttaaaaattcctcattttctatctttggcatctagttatttgtaatgctttcaggtggctgaagtttgaagaagatgttgaagatgggggagaacgctggagcaagccttatgtggcaaccctttcattgcacagcctgtttgagctaaggagctgccttattaatggaacagtcctcctggatatgcatgcaaatagcatagaagaaatttcaggtaaggttggggaagggaaaacagagcaactttcttataaatttaagaagtgtgggaaaaaaggagtgtggcgtgacagaaagaatacagtgggttgtgtgtccttgggcaagccacaaccttcctggcctcaatgtccttggctgtgggaagggtttcaggctaataaacgactctacctacttcacaggtgtattatggtattcaaatgacatggtgttaagtttccatttgtctgtttattcagcaaatgttttattttgtatctgctatatacttgataatgtgctaggcatggggttatgaataaagttccctcgggtgcagtggctcacacctgtaatcccagcacttcgggatgccaaggtgggtggataacttgagctcaggagttccaggccagcctggtcaacatggtgaaaccctgtctctacaaaaaatacaaaaattagccaggcatggtggctcatacctgtagtcccaattattcaagaggctcaggcacgaggatcacttgagcctggcaggtcaaggctgcggtgagtcaagattgtgccactgcactccagcctaggtagcagagtgagtgtaggggtgggttgcccctacacacctgtgggtgtttctcataaggtgggacgagagatttggaaaagaaaaagacacagagacaaagtatagagaaagaaataaggggacccggggaaccagcgttcagcatatggaggagcccgccagcctctgagttcccttagtatttattgatcatctgtgggtgtttctcaaagagggggatgtgtcagggtcacaagacaattgtggggagagggtcagcagacaaacacgtgaacaaaggtctttgcatcatagacaatgtaaaggattaagtgctgtgcttttagatatgcatacacataaacatctcaatgctttacaaagcagttttgctgcccgcaggtcccacctccagccctaaggcggtttttccctatctcagtagatggagcatacaatcgggttttataccgagacattccattgcccagggacaggcaggagacagatgccttcctcttgtctcaactgcaagaggcattccttcctcttttactaatcctcctcagcacagaccctttacgggtgtcgggctgggggacggtcaggtctttcccttcccacgaggccatatttcagactatcacatggggagaaaccttggacaatacctggctttcctaggcagaggtccctgcggccttccgcagtttttgtgtccctgggtacttgagattagggagtggtgatgactcttaaggagcatgctgccttcaagcatctgtttaacaaagcacatcttgcaccgcccttaatccatttaactctgagttgacacagcacacgtttcagagagcacggggttgggggtaaggttatagattaacagaatctcaaggcagaagaatttttcttagcacataacaaaatggagtctcctatgtctacttctttctacacagacacagtaacaatctgatctctcttgcttttccccacagtgagaccctgtctcttaaaaaaaaaaaaaaagtaaaagaaagaaacggttcctaccttcaaggagctcgccttcaagtgggggaaatagccatggaaataacaattaaaaaaagtgcaacgacagagacatgcttgataataattagagaaaggggcaactggaagttgtgtggaaaaaaggagtaaagagaattaaagactttaaaatatagcatctagggcagatattcaggaacttgagccaaagtgcccctacctcttcagtaagatgtgaaggggagatatctgattgttcttcctgatgtgattgagtgttaagttattatgtttggggcctgaatggagaaacacctggatgcatgggggagttttctcttgaattggttctgtttggctggacaggttaagaaatatttctccaaatctttctctatttcaagtatccaagtcattctgtctctctgggatcataggaggacccaggggaggggtaagcactgatgggacattgggcccccctctttttcagggaggtaccccagaagtatcactctgactgcctgggaaaaatgaaattctcatgttcatcattggagtcacattttgctaacttttgactatttgtctgaaatcccatgaatgttccttaaaaggttgtttgttagggagaagaatccctgggagctattgaagctgtttaaaactctttgtaaacaacagcagtcacgggagagttttggacagggtaatgatcaatcagattttgcatattagaaagataatgatggcagcaatatggagggtgagttgatgggagaaatgcattaggctattgcagtagttcaggtgagatcacctgcactgtgggcagtgtcagtaagggatggataatttttcttctgataactttaagtgataagagagacaggaggtgatagatagagggagacatgaggtggatgttcttttttttcccccaagatgaagggtcctgaagcatgattataatatagggggaaggaaacaatgaatataaaggttaaaaatacagaaatatggctcttcagcttgaatattaaatagattttcctcatttatttcttctagtacttgaatagtcatgaatagaattagaaattgaggataggttcagatttttgggaggcttttgaagaagtgcataggactgaagtaaaagtgctatgattcttcacatcaggtacctaatatgttcataatattttagggatactgataggtaaagtgcctaaaaggaaatcagcactgtatatcatctcatttaatttcctgtaacaaccttttaacagataatatgagctccatgttacagatgaagaactgaggtatagagagattatataccttgctcaagatcacacagctaaaaagtggtagaacagggaaacaatgtgggcctttaactccagaactcatactgataactgctatgtttactgccacttaacactaggtattgagatttttttcctcctcaaatctgttgggcttgataggtttaaatgtgatgcttggtggtaattgtctggggtgagtggttagttaacttaatttttcttatagatttctcttctaaatagccctttggagttctacagttatagttcttcttgacaattacagcaatgttaaaatcttggaggaaggaaatgtaggggaaatttggcagatgacagaacaaagcaggtaataatgtgagctttcaaattatacagtcctcaatttgaatcccagctgtgcaaactgctagatgtaagaccttggagaattttctagcatttgggccttaatttcctcatttgtaaaaattgttgtactagtgctcaatagtttctatgcccaataagaataatttgttacatgaataaagtataacttttcacagtcactatcatcaaatggcactttcagacaggaagctgaaattgcacctcaatgaccctagtggagctgcttccccctactccatgccctttaccccactccacctgatgttggccttcttgggttcattaaccctcaatctgagtgttcatgtgagtgcctgctttccagacctgatcctggatcagcaagaactgtccagtgacctgaatgacagcatgagggttaaagtgcgggaagcccttctcaaaaagcatcatcatcagaatgaaaagaagagaaacaacctcattcccattgttcgctcctttgctgaggttggcaagaagcagtctgatcctcatttgatggataaacatggtaagattattaggtgatttttctctctttattaataagacattgggaactagttggagatgctgacttactaggggtgggggctgtatttgtctaatatgtttccatgtccacttaggcacttagtactttttggagactggtaagattggtggctgggactggtgctcatctctctctcacggcattcctcagataggtctcagcggacccaaggtgagggacttatgccccagggtggcctcagaactgatgtagcttttgagagatagccacattggggacaatttgagacccgagaaggtaaactggagctttttaggagcaaacaaatatcttagattagggaggcaaaatacagtagagtaggctctggagtcagacttgtaggcttgtgattgtggctttaccactcacaaaatgtatgactttgggcactctactaagcctctttaagtctcactttcttacctataaagtaagagtaataataggacctactccacctactccatttattgtgaacttcaatgagttaatccatgtgaggcccttagccagatgcatggtggattataatcactcagaattttggctactgattggttccttttcctgtggccaggaagggtctcatctacatttatttcctggtctctactcatagtgaatcaccatgtgcaggggatatgcctgggaatctatatttttgaaaagttttccataggggtctctcatatgcatgtctggtgaaggattactgccttaatagagaaataaaagagggtcataaatgtgttcagaaagaaggtgcagaagtagcaagagctctgtcctttccttaccactaactagtagataaggagaaagatgtgtgtgggtcttgacttcgtagtcatcttaacctcttttctagataggctttgcaggagaaggcagaaccaactgatgatgggtgggatgtgtcagaaggggaaaagggcagggactcaggattttgttttattttctccaaataggtcaaaccgtgtctcctcagtctgttccaactacaaatcttgaagtaaaaaatggagtgaattgtgaacatagtcctgtggatttaagcaaggtgagcagagtggtgggaagttggcttcaaggcctaaggttccttttagtggaatccagagtttaattgctggaatctgggtaaggtttagtgtttcaagactctttccctaagactagagccctttctgcataaaagggggcccatctctgcatgtcttttcccttctccttcagcctggatgaagctgactcaacagtttctttctccagattcaacatactgaaaactgggactagctgcttagaatcttccctaaaacagatctcttgatttttcaattatttttttggtacctgctctccagcagttccttctcacccccaggggttttgccaaaacaatattttggatatctatttagagacagatgtctcctaaaactaactcttggttgaagctctccttgaggactgtgactttggtatctgaggccttctgtagcagcagtgtctcactgcagcttatggtccaagccttggtctccctgcctccagcctctccttgctctggtctatctttgacactgtgtttctaaaacacagatagtgtcatatcacttcctctgctcataaggcttcccattttatttggaaaacctgaaacccccgacaaaacatttgagtgtttaaaaagggaaagaatgtgacccagagcttcagaaacatttctcttggaggaagcttgggggaatgggattgaaatcagaatacctgattttaaaatccgaacctataccttaaaagctctgtggtcccgggcaagtcaacttcacctctctgggtttcaaatacttcattttttttttttctttaagtgggacgaatacaatctgtcatatcctccttctggggtttttgtaaggatcaaataaaataagaaaacatttgctaaccataaaatgacatatgagtgtaagatatattttaggtgatggggccaggtgcagtggctaacgcctgtaatctcagcacttttggaggctgaggcgggtggatcacatgaggccaggagtttgagactagactggcgaaaatggcaagaccccatctctactaaaaatacagaaaaattagctggacatggtggtgcatgcctgtaattccagctactagggagcctgaaacacaagaattgcttgaacctggcagcagagagctgtgagctgagattgcgccactgcactccagagtgggtgatgtagtgagactctgtctcaaaaaaaagtaaataaaaaatttaaaaacgatatttaaggtggtggttcccaagttgtcagatgtttcttttggactttcaggtagaccttcatttcatgaaaaaaattcctactggggccgaggcctccaatgtcctggttggagaggtggatattttggaccgtcccattgttgcctttgtgaggctgtctccagctgttcttctctcaggcctaacagaagtgccaatcccaacaaggtaaaggcaaagataaaactcatgcattctatccaaaattcaaatttatgtagtgctggtagaagaaaccacttaatactgaaatttagaattaattaattttaggaatggtgtttacaattcagcagaaaagccagatgtgctggtgtgtgcctctaattccagctactagagaggctgaggtgggggattacttgagcccaggagtttgagcctgcagtgagctagaatcctaggatagcaccatggcaccccagtgtgggtgacagagtgagaccctgtcttttttaaaaaaaaaatcagcagtaatctcagaaaattgaggtatatttgattaaccaccatgaagaggaattctgagatttatttctaaggctatgactgcacagtatctatagccttggaaatagagaattgaagaccattcaaaggacatagcaagggccaataacttgttaaaataggaagccaagtcttatcttctcagttctgtagagccatattccaggggaacgtctctgaataaaggtatttgtttccctttgcacaattctggcatggtttgtatggtttgcagatatgcaaacatttgttcaaaaggctattcatgcgctctgaaggtggtgatgctggtgattcagagccctgctacttacagagagtattcagatgtccagaacacatttagactcctctgtaaggcttgatcatttcaacttccttatccctctcctctccccatcattttctgattagaacaataagtggaattcagacaaccttgaatttgcaccacagtgccatgttttgaaaaagcatcttttctacagctaggaattgtgtctatggaaaccctaagaaatgtaatcacattattgaatgatgccgcacaatagcttccaatgcccatagtggagctattattaggtcaaggcaactcaaagtgctccttcattactgtcttcttttttttttttgaaggtacagtgatgatttatgtacgataagagagagaaatcttatactgtttagagaggactaatggcacttctttatatttacttacataatttcctcctctgtgtgttttgccagatttttgtttatcttattgggtccagtagggaaaggtcagcagtaccatgagattggcagatccatggccaccatcatgacagatgaggtatgtgcaacttttgcttcagtcttccatctcataaatatttattgaatatttactctgtgccaggcaatatgctagttattggggataaaatactttccattgcaatatctgctgggaagtagttcagggtacttctctgagagcccagtgtggaaggaccaagctctagaggatttttcttcctatgttatctctccttttttgagtaatcaagaatgcagagaaatctttttctggggaaactattattgccaagtaggatatatagagaaatatattaaggttggcttaactttcaagagaagatggttaattaaatacattcaagctatttacataaagaaacctcactcctgttccactaaatgagaccagtttgtataaggtcatgggtgtgacctcaggcagtgtagtgtgaatgtcttgactagtctgtaccaaaacaaccagatattttgacattttgacattgaacccacagtgcatactctggtaaggactgcactgctcggtaagctgcaaagtagggctttcaaggcatatgccttaggcggcagagggaggtgtggcctgttttttatcagctttctttgattgagaggcttaattcaggaaggaccttcattagtaattccatccagtgtttccaacctttaagatcaagaaaatttccctctcaacgtgggaaagctgattaaaattttttttttcatatatcttgcctttccttccatcctttgtggagataacataattgtacaactttagactcatgtcttatctcttcttatactagcagacatgtatttagttcttttaatgcatctcatttccacgcttgttttttaaatccttttatccttgcacttctctaagtgctaaagttttctgcatctcagatccccgtgacagagataaaaatcaacaggttgtattcatttttcaccatatccattggtgattgtttcatgtaaagttacttttaactttcctgagggttttctcttctctgtagatttttcatgacgtagcatataaggcaaaagagcgagatgatctcctggcggggattgatgagttcctagaccaggtgacggtgctccctccaggagagtgggatccctccattagaattgagccacccaaaaatgtcccttcccaggtaatgtatgcacatcagccaatgtggctattgtcacttactgactgcccaccatggacaaagcaaagaccatgtgggtatatgctaaatatatcaagatgcagctctgttttggtgcacctagaatatcaaaacaataataaaaatgaatctgggctgggtgtggtggctcacacctgtaatctcagcactttgggacgccgaggcaggtagatcacctgaggtcaggagtttgagaccagcctggccaacatggtgaaaccccatctctactaaaaatacaaaaattagctgggcgtggtggtgggtgcctataatcccagctacttgggaggctgaggcaggagaatcgcttgaacccgggaggcggaggatgtagtaagctgagatggtgtcactgcattccagcttgggtgacagagcgagactccacctcaaaaaaaaaaaaaaaaagaatttgcatagcataaattggctcaggtgtgatggggtcagtcaggattacctgggaatgaattttaagccaaattttgaaggaataatgtgaaatagaagagagaagggagaacatttcttgtgactacattgtatacaagtcatcaaatgaaaaaagcaagttgtatagagagagcagatagaatgtctgatatttttctgacatattagagatgggaaaggaactcctactgtgtattagacagcagccaggtgctttatatatgcaaattcagccttcccaggaacatccctcaaaagatattgttatctctagttttacaaaatgaggaataaaactgtcttctagggcaagattttaaggtaaagtaagattacacagaggcagatatgaaactggaacttaggtcatatctaatgccaaagccccatttttctctttctaggcaaggcttagttaggagtcaggtactatggaacaggaagagaaattatggggtgtgtgtgtgtgtgtgtgtgtgtgtgtgtgtgtgtgtgtttcggtaaagtcaataaactgcatcaagtcagtaagtgtatttgaaagctacaaacacgggcatttttggttgcttttgggttatcccattcccactccctgctgatagcaggacgaaaagatagatgttacctttactaattttgtggtcttctgttaaaaggagaaaaggaaaatgcctggagttccaaatggaaatgtttgccacatagaacaggaaccacatgggggtcacagtgggccagaacttcagcgcactgggcggtaagtcctgggacgtttcacagcgatgctgcttattgggtagaagttatgcaaaggaatgaggcatcttctttctttcagcctacttctctgtggtgggaatttattggctgaagaatgacttttcaaatggaaccactgactagaagtattatgaatatatcaaatatcgtattcattcattcaagtttctcaaatcacctaccatgttttgtctcacctccagtccttcctaccattgttccctctgatttgaacactcttccctttcctcatctcctggctaactcctacgtacccttagtctcggttcttgtgtcacttcctttggaaagccttctaggactctctctggatgaggttaggtgttcctgctatgtaatatcacagtattgagctctgaccctcccttccccacattacagcctttatcatacttcattattattggttgatctattgtcttttctgctaggctgtttattccaaaagggcagaggctctattatattcctaggacccagcacagtgccctgaacagagtaggctctcaatgtctgccaaatgaatgaatatttttagaataatgtctgttctgtagcatggaatggactaggtatgataaatgttgagtgatcattttaggttaagaaactcccttagggtaggaagataggtactattttaggtgtgtgtgcctcagaataggcaatctactcttctaggccaacattttaaggacagatgtccaaggaggaggtaagtgagggaagcaggtccccagagtaggaggttttattccctaggtcagaaggtggtaaacgagaatgatattttgggttagtgtgatatccaggggtgtccccagagaaggttgagactatggctctgtctctgttaagctgtgctgtgtctaagaaggttctgctgggtagagattctcagggcaggactgagatcatggaaattagcttttatgtcctctaaccccttgctttcttcttttctgcctccttgcttgaggttgctttccttactcttctatcctcagcactctacccagtggaaactcagagttgttttggaattgtggaaagcattttatttttccaatcttggaaattcagggagaaaccaggagaggagacagaaacaggagagaatggcacttgactagcagtgtcctgcagagaagcatgttttctggtaggaagaatgtattggagggtaggggaagatagctgtgctctgggagggagcattggtggaaagaaggagtccttgcaatggaagggccactgaaaaggggaagcagccttccctttttaaaaaacattttctttaaagttgggagagatctgaattgggtggggaggcctggtattgagaggcagttcaagggaagcatatgtcctcagaaggggttccaggattgagactgtcctagaggaggtggtaatttttttcaggaaaaggttttgagtatggatttgatatttcaaaattataatttatcttttggatataaagggtgtccacactttaggaacttagaatttgaaagtagtagaatttagggcaacaaggttttcctcaaaccaatatctgtgcagagatgagattttaggttgctctttgtgccaaagaaaacaaatagattagcatcccaggctttgtgagaggtggtcacttataatcaattccacctgagggtttgggagaccattatattggatctcaacagttataagatcttggtaatggtgtctgatgtccccaagaaaatcccatattgccaggatcatcatattcttattcacaaaccgcaagtatcttaactcacaaattcaaatggagtttgaaggagttctcccataatgtcatgtcaggaacttctggaattgacaaagctaaaaggaagctctgggctcagagcttagctctgcttgatatgggagatgcttcctctttctgagcttctgtcatttttcttagagcccttagtaaagggcctcaagccatatgaccttcctcccattgtagccccttaggcaaggtgacataatggctgcatagagaatcacatttccaggccagctctggcctctttctcagtctcaaattatgtgggaggtaaatgtgagtcttttttgtatatggacatcctataagtttctgtactttcctggactgcacaaactaaaaccacattagtctgggttttataatttttcggactattagttgtgtttcttggagatgcaaaactgctttatgcttgtcatgttgcacaaccttggagcaagacttggataacatcttacggaatgttatccttgttggatggagaagtatttgaaggcagggtgaagtagactctaagaagatgggaaaggagacaaaattgaaatggtactctgagttctgtatgatctgaccctccaagccagggttaagacagatcttaaacctccctgatattgactaaggcagggatgccataagtaacaaagaaggaaatatgactagagtgttcctaggccggaagctccacagcaaggagggtgctctggaaaggggtttttcagggtatatttctgtcccttattggggatgccacttttgggaagggttaatggaaaaaagaatcaggagctgctatctcgatgatccccccacacttcaaacaggtttcttccaaagtataccagacaaatggatggctggcctgtttctaaagccctccagggaagggctccttaagtcaatgctccagagcctagtgaccctctacgcgggtaagtcctctcttgcatcaaacttaaattaaactcatatccctgtgtgcctcctgccccagaaaacttgaatgtgaagggcagtgttgaaagggaaaggaaatcccaagtacagaaagaagcatccatgcctgatgaatatctgttgtagatgtgcaatcatagtctgattttatgcatgaatgaggtatgaggctgactccataaagtgttcagaaattattttattaatttatagttataccatccatatgagcctcagatctttccccgccttttaataactgctagacagacagatgtcttccctttctatggcttcttagaaatccatttcacataaatcttttgtctgttgctcacagacactcctgtcctcctgtgtctaggggctgagtattcattgcagcatctcaggtagcctcagagtatgtgtgtgtgtgtgtgtgtgtgtgtatgtgtgtatgtgtgtgtagggggtcactattatgcagggatattttctcacagaattatgctttccagaggaaggtgactggtaatgaagaggtaataatcgcatggtaataagatgctatgttagctaagaacccaggaatacttgagtcttgccccagataaattattgctgcctgcaaggttattgaggggctatttacctagaggagaaagcaagacaaagtgacactttattactaactgaagcattggtcccaaaccctgaagcagaattcatgatttaggctagaccatgtagatagcttctttacctgagctaggtttgccagataggctaaaactaaggcaggtcacaaggctggctttgcttctcttccctaagcccagacccagattatgatgttactgctgtaagctgaggaaaggtgaatcccaactatacccaccagaaccagaggaaaagagcaggtgggtgtctgtcctgtgtccacctggatacccattatactagctagatgagagagagtgttccaggagaaagagctggctggatcttctcccctagcatacagatcccaggcctcctcatactcctccaggcttctaggtgacagaaggaaagaaagagcttgccaagcctccttccgtgagagagtagcttgtgtgttttttaaaaatagctttttattatagaaaatttcaaacatataaaaaaaagggagaatagtttaatgaacccccatgtacccatcaactattaccaacattttgccaatcttgtttcatctatttcttctcacttaattttatttttatgttttctagattattttaaaccaaatcaccgacatacattttacctgtaaatacttcagtatgcatctctttaattaggacattaaaaaaattatcatgccattatcaaatctaacaaaattaacaatcattctttacattgtctaatgctcagttcttattaaactttttatgattgtgttagcaacatctttttagagttcatttgtttgacataggagtcaaagtttgcatttggttattatgttcccattctgtaatagtcccttttcctttttttctatgccatttattggtagaagaagccaggtgatttgtgctataaaatgccgagtggctctttttgttattcacctgacagccctcaccctggtgcagtgactccactcttagaaaaagtgattgaattgggaacacatctcctccttagggatattttggtcttggtctgtctcatctttgagaagaggagaggggccctgaagtcctgccaccaagtcctgttgattctacctcctgattagctcttgaatccatccacttctcatcctaatctatgctccattcattatactaccacagagtggtccttccagaatgtatgtttgattatgtcactcttctgtttatagttcttcagtaacttgacatgctattaggataaagttttaattccttaaaaccatttctggccgggtgtggtggctcatgcctgtaatcccagcactttgggaggccaaggcgagcagatcatgaggtcaggaggtcgagaccatcctggctaacacggtgaaaccccgactctactaaaactacaaaaaaattagccgggcatggtggcaggtgcctgcagtcccagctactcgggaggctgaggcaggagaatggtgtgaacccaggaggcggagcttgcagtgaccagagatggcgccactgcactccaacctgggcaacagagtgagactccgtctcaaaaaaatatataaaaataatgaataaaaccattttttaaggcctttttgacttagcttctccagccttgtctattggcattcacccttcacactgtattatccactcatatctctcagcaccttgatccaccaagcactctcacctctaagtgtcacccatgttggcccctctgcctcatctgcttaactcccagtccctgcctgaagtcatggctgaaatgcccctccctgctctatgccaccatagcaccctcacaatactgcctgtctcctgcactagacttggtcctggagagcagggctgttcatgtcttgctcattgccgcatctccagtacctggcacagtgcttggcaccaagtatctgctgctacttgtcaattgcatgaatgaattattatatacatttctcacaagtaaggggggtagttgttcagagtaagaaagtacatgtgataggggcttttttatctagaaaacatttaataaaactagtaattttaataccttaagttggttttgcacatttcctcctaacagctcagaatttaaagtctgaagctaatacttgctttcgtgttaatttttttgaactttttattgaatggataatacgcatatctaaattaattctttgtatgtttaggatattcattcaaatttacctaagtcatacccttggttgcaaagagactctctgctgacctaagagagttatctgtactggggtcaaactgaagccaaagtcttaccgctgaacagagcacatttgaaatgctttcaaatgtgtgctgtttacatgcttttagggaagacggactgtgttagaagcctgtctgttgtgtttccacaggctatttgggggcttggtgctggacatcaagcggaaggccccctggtactggagcgactaccgagatgcactcagcttacagtgtttggcttcctttctgttcctgtactgtgcctgcatgtcacctgtcatcacctttgggggactgcttggagaagccactgagggacgcatagtaaggacttttaaccacttctaatgatcccaaacaagacctaaaatattgtggcggcagccaggtccactgtgggggaaattacttggtctaggactgaagagattggatttttcctctgaattaccatggtcttctgacatcacaccaaagagcaacacagtcctctctttagaacagactcttctgcttgaacatcagcttcagtagctggttgcccagttgaattttctgttgcctcagtgatggaaaatggatatattgatgccatttcaaaataagatttaaaatgactctgtatgtgagcttgtagtgtgaatggtatcactgtgctttctgtatattttcaaatactgaattgagtcactgaagaataggagttagttaaggaatcatgtgtcaatggagctgggcacctgaattattaaagtagtatctgtttacaggagtattacatggtgtgtacacatcactcttgctaagatgaaatacaagcaaatggccatcaaggcacacaggagagcaaagtcaggaatgtagctaagccaacattactctgtactgatgggctatggactcagtgatgactttttttcctctcagagtgcaattgaatccttgtttggagcttccatgactgggattgcttattccttgtttgcgggacaggctctcaccatcctgggaagtactggaccagtgcttgtgtttgaaaagattttgttcaaattctgcaagtaagacatttgtttttctgaaaactctaaccagatttagtgattatgctgccaggattaaatgtcagggttctactcagtacagacaggcaatatcattttggattgtaagaaacctgaaaggagaccatcatttggtctgttgtcctgcccccgggtagcaccatacccaaaatagcagatctcctattgttaaagagcttgattaatattcctcagccattattgaagtcttgactttttatctttaaaaagactttccctagctaattcaaacttctccatttccattgtgagtcaatttttaatttggcctaatatcctccccctgctgtttttttttgttttgttttgtttttttgctattgatagtggggcacaagagtgctctggtttccctaattttcctatacaatcttttcttttttccttttatatttcaagtagcagctcatgggactatggccagcccctttttttcttaactgcaagaataagatcataattacattaggtagtaatggcaggaatgtatatgagacaatttctttttttagttttcgtatccttgcgcatatcctgtgaggcaaatctgtatcataactgtgccagagcactatttagaaggaaaatacaatcagaattagggataaactgggttccagtgcttgtttagatgaaatgaattaaccacatttctgactccttgtctcttaatgccatccatccatgcgttctgatgaactttggtcttgtttcagagactatgctctttcatacctctccctgcgagcttgtattggactgtggaccgctttcctgtgtattgtccttgtggcaactgatgccagttcccttgtctgctacattacccgtttcactgaagaagcatttgcctccctaatttgcattattttcatctatgaagcaatagaaaaactgattcacctggcagagacctaccccatccacatgcacagccagctggaccaccttagcctctattagtaagtgtgctttctgcttatttttaaaaattgagcaaagggcctgagtttaattgctgatgtagagtgctaggcagtgcttacagcttctggtcaagaagtgtcttgccctttaggaaacggatctcagatacagacaaggagtattggagggctgccagaggagaacaatcaaaagtgttgacagagaagatcgactagaagtgaaacacgaaggggactcaagaaatgctttccagaccatgtcttttggttctaggcactgaaacaaaaatgggctgcaaatgtagcagggagaatttgagttagttatggggaggaacttctttttgcaaggactttgtgagcctctggactatgttatcaagtgagagaatggactctgtcctttgttgaaatgaaggactctctttctctgaaagtatgtacaggcaactcttaggaattattaggtgaagatatattaatcattcctttcagatccagaagtgtctcacactgtatcataaagatccaggagcctacttacttcctagatttcaacttaagagattatgatttctttatgtgttcaatatggtttggatcacttggaaaagaaacacggtacctggctgtgttttcaaccatctaggacactctggtcctataaacatttcttctctggaatagtattctccaaattatgactaaagatcctcttcccttagctctgtacatcaagttctggctgtacagttctgatgtggaggatctggttgtgaaatgaacaacttcagtctgaaactgtctcagaagagagagtacactttctggaggcatctgcggaccagcgacagatacactttcatctattctagttattcactcattaaccttttaaaaatcagaattaataaaaaatttattagaactttattttactagaaagtaacaatgattagggagtatcatcttcaaagcctagtgaattggctcctattggcattagagttctcatttctgtaaggttgattctttgacctctttttatcattattttctttgtttaacaaatatttattgagcacctattatgtaccaagcaccattttaggccttggaaacgcagtggcaaacatgacaaaggatctgtctttatgaggcttatatctgagaagacaggcaaagtgaccagccccggattgagtagactttggttccagaaacaaattctttgttaataaagctcaagatgatatttttttttagttgcattctactgttatttcatatggtgctgatgtgaagctagaactccttaactctttaaatgattttatgttaatatgtatgtaattgatttttaaaaaatagagtttattttttaaagcagttttaggttcacagcaaagttgaacagcaagtacagagagttagcatataccccctaccccagcacacacacagtctcccccaatatcaatatcccacaccggagtggtaagtttgttacaatcagtgaacctacacagacacatcattgccacccaaagtccatagattacattagagttgactcttggtgttgtacattctatggattttgataaatgtataatgacatgtatcctccattataatatcatacagaatactttcacttccttaaaaatctcctgtgctctgccagttgctctctccctacccccaactcctaacaactactgacctttttatgtccttatagttttgaattttccagaatatcatagttggaatcatacagtacgtagccttttcagattggcttctttcactttgtaatatgcatttaaggtcctctgttttttcatggcttggtggttcatttcttcttagtactgaataatattccattgtctggatgtaccacagtttaattatttggaattgatttttttaaacctaagtatagggctttatagctttccctattacttttcgttttgtcaatttcttcctattattctaacctgtcgagagctttttgaattttaattcagtcatgccgtatcttagaaggcatgcttattaaattcacagaccatacaaagttagtggtgttggctgtgtcagttgaccatattgggagccaggtcaggcatgaagcatgctgggactgggaggcaacatggtggccaatggcacaggtgtggtctggtctggtctggtttggctggagtaggaggcctggggaagctaatggagtttctaggtctggctctaccatgagcggccagggaatggccaaggtagtggggtattaccaaagataactcagtgtcagaaagtgcttacatcacgattccaggagactctgacttttagaacaagagcatgacgaagggtatagagaataagatattcaggcttggaagaagttattgagaagtaagtgggatatcgagacctccttgctatgtagactaaatttcatagcaagagcctaagagatagaaatcgggcaaaaacaaaaaaacaaaacaaaaacaaaaacaaaaaacaaaacaaccaatcaagactcattctgggcacatcagatgccaaatgtggttatcagcacagtttaatccaagacccatgggctgatttgagtcaaacttttgtaatgactgactgaaaaattagaatgtgatggggcctacagaggggcctcagctcctcaggtctgaagtatgcaaagaagcagcaaggcagctcctgacagcctttaaaccagttgttctaaaaacatttaactgagtatttggctgttttcctcaggaatctttttaatttttcccctcagctgcaggtgtactctgccagagaatccaaacaatcacaccctccagtactggaaggaccacaacatcgtgacagcagaagtccactgggctaacctgactgtcagtgtaagtctgggagctgccagatgtcctagcattgtgaccacaggtttaggagggacttctaagtgaaggggaggagtagccctttggccaaactctggcatttaccgaaataaagctttttaaaaaacaattcttactcactttcttttatcctttcagaatttttcttgtatgttaagggagaagattacccttctcttttctcccccctacatcctacccagtgaccctgcactaaggataggtggggatgaaaccatgcaggacagggggcagatccagacatgtagggttgaagaatgttcaagtttggaggtcctctgtgataagaaaaatataagttgccagggtccttccagagccttggaagtagtattgttcagaacagttctatgtcttaggaccataagtaaccaccctacttgaaagtggcctgtgcaagacagcaccccgcaactgcataaaggtcaaggggatgctgcttgcagcctctgctcccaacaaccatgggatgacaatgagtggtggactcagtaggaaacagctatttatttggttgtgtctgcctttcatcacccagaatgcttattcctccaggaatgccaggagatgcatggagagttcatgggatctgcgtgcggccatcatggaccctacactcctgatgtcctcttttggtcctgtattctctttttcaccaccttcatcctctcaagcaccttaaagacgtttaagacgagccgttatttcccaaccagagtaggtagcatgttcatgcatttctttcacgttagaatcaaatataacagaaccttttctcagccttcatgctgcttatggggttgattggccaggtggagaactccggatgtcctgatgagccacactggcattctctcctagtgtctggcagcctctttcatagatctgtggttgggaatgaagggttaatacttaaaacctttttggtttacaagtgccagttaaggttaaggtggtagtgatggttttttaaaagttattaagtcttatttccagaatgctgttacgtttcatttccagaattctgagacacttaacacacaatagctacagctggctcctgaatacagtaaattgtcattgtgaccttggatactttaggggacccaaaaatcttctcccagggatggcttttttaatagcttatgaaatcactggcgacactgactgcagcaaccagcatgctcctgacttagtttgtatgactgtttgaaacctcagcaacctttccatgatgcagatagcattgtttgtattatgagcaaggcttttgccagttttggcagggcaagattagaggctgagtgtggagtagctacatgggccatttctttgaaagggaacttgagaaggtggagaatggctactgggacctcatcacagaaagttaacactgaaaagaataagtgcatgaattatttacatccttcagtcacatggaaacatctataataaatgaccattacatttgccatatcaaaaatataaaaggaaggtgggtgatctacagtgaccacaaagtttgtgccacagaagggccccctgaaggcctgggttacatgtacttttaccacagtataccaagctaaacctcaaacatacgaatcagtgagaagaagccacatacctttttaatttgccaaaaagttagaacagccagatatgaagaaatacattgtgtatttgtagtttatttaaagaatacactcatgctgggcgtggtggctcacacctgtaatcccagcactttgggaggcccaggcgggtggatcatctgaggtcaggagtttgataccagcctggccaacatgctgaaacccatctctactaaaaaaacaaaagttagttgggcatggtagcacatgcctgtaatcccagctactcgggaggctgaggcatgagaatcaattgaacccagaaggtggaggttgtagtgagctgtgattgcaccactgcactccagcctgggcgacagagtgagactctgtctcaaaaataaaaaagttaaaaaaaaaaagagcacagtcatttgatgccttctgatatagaactgagaagaaattcatattagtgatgatacactattgtagatagttttaataaatgtttaaggagaagataatataaaaaagggtgttcattttgctggcgagagatctaccatcagtacatcaaaaatggggatgtgctcccagtcctctattgggggataggtgctagtggccttcagagaaacctatttatgtggccagtggtgtggccttacctgcagtaaataaaaaaccttcttggtgtttcatatagaaaatcagccattgggcggggcattatttacggcatttttttttcattgcacacaataatttctgacctatacatgtataatacagcattttcttgtttttctttttcttttctttttttttttttttttctgagatggagtcttgctatgttccccaggctggagtgcgatggtacaatcttggctcaccacaacctctgcctcccgggttcaagtggttcttctgcctcagcctccaaagtagctgggattgcaggcacttaccatgcctggctaattttgtatttttagtagagacggggtttctccatgttggttaggctggtctcgaactcccaacctcaggtgatccgcctgcctcagcctcccaaagtgctgggattataggggtgagccaccatgcccaaccaatacagcattttccataaaatatatttttaatttaaatcatacaaaaattcataatatgattttgtgaatgtgtgtgaaagtgtgagacctttacatttcactacaaaacctgtgatggtttggtttttaaaggctaaacggttggtattaagcaagtaaatattttaatgaaactataactcaggaacagtttaaaatattagtttcccacttagatttcaaggcataaaaagggctgagtttatccctttaagtgctgtcaagaattcacttgggtttgtgatatttggtggtacaatgccaaatgcccacagcagcattatattgtactttgccaaaggtagacagaggaattctctatttctcagcagtcgtttccccaaaaagtataatgtttatttttagttaaaatagtcttgttttaccataccacatgatgactccctggaagttatcatgtgaagttccccaaattagtattttctcatctctgagctctttgcctgactccatttctacatttttcaggggccagaggctcatctctgccatttttccatgtatcgcctcctgatttgacttcactgattatctgctgtgactagcagtgttattttggatactttaagaatttcagatatggccaggcatggtggcttacatctgtaatcccagcattttaagggaggccgaggtaggtggatcaccggaggtcaggagtttgagaccagcctggctaacatggcaaaacgctttctctactaaaaatacaaaaattagctgggcatgggccgggcgcagtggctcacgcctgtaatcccagaacttgggaggccgagatgggcagatcacgaggtcaggagatcgagaccatcctggctaacatggtgaaaccctgtctctactaaaaatacaaaaaattagctgggcatggtggcgggcgcctctagtcccagctactcgggaggctgaggcaggagaatggcatgaacctgagaggcggaggttgcagtgagccaagatcgtgccactgcactccagcctgggggacagagcgaaactccgtctcaaaaaaaaaaaaaaattagctgggcatgctggcaggtgcctgtaatcccatctactttggaggctgaggcaggagaatcacttgaactcgggaggtggaggttacagtgagccgagatcactctactgcactccagcctgggcaacagagcgagactccatcttaaaaaaaaaaaattacagacgcaaagaaactttatatgatattataaaagacaatcctttccattttggtttatttcagtattttagttgcaacctgggattaaattggagtttcaaatgtgatgaaaagtagaatgataacattctgtaattttcctactgctctgcaccaaattccagagtctctggagtttgtatttcaaattactcagtcgaatgaaacaggatttattgctgtctgcttaacatatatttgtttggttgaaaggatttttccagaaactgtaggaaaatgaagcagaatcaactgggtgaaatatagcacaaacattggattaggatgtggtgaattgtgaacaatcaggattctggttgtgactggggcccctgtctcataggagcttaataccatgtgagccagggacgcagtgtccaaggcccatggcctggagacctggatgctggctgtggaccttgggcaagtccctcatcttccctgtgcctcatctgcacaatgatgtgatgacacctgccatctctttccaattatgcttcaaggatgcagtgagatttgatatgatgacccaagagtagaaggtggtgtgccatggtgtgtcctagtttagcatgctccctgccttctcttctctgacattttattcaatttgggaacagatgggattggcaggaggggagctcatggtgtagtaatactctactaaagtgtgcctattggtattaccttctaatgttgagttggatttcctaaagcagcccactttgttactgaagttgctgactcctgtggaaatccccatactaagcagccttacaaaatccagtccccatagaataatgactccacacaggcgtcaaaaatggattgtcttcaattatgttacaaagcaaacacctttttgggggatggaggatgattgggtgtttggattgaaatgtagacaaaggggctgtgtgcggtggctcatggctataatcccagcactttgggaggccaaggtgggtggattgcttgaagccaggagttccagaccagtctggccaacatggtgaaaccccatctctactaaaaatacaaaaattagctgggcgtggtggtgcatgactgtaatccccactactgggttgaggcacgagaattgcttgagcccaggaggtggaggttgcagtgagctgagatcgtgccactgcattccagcctgggcgacagagtgagacttggtctcaaaaaaaaaaaaaaaaagaaatgtggacaaatatagctagcaagtgtattttgagcaaaatacatattttataataaaattttataaataaactttgtaaaatcaatggtataaaatcaatatttaagattataggctatatgttacttaatttcattaaatagaaaaagaaattcagcccttctgatgcctaaacatattgtaagaaagtgtactatggctgcccttttttctgtctcacgaaacagagggctgtttctacaaggccaagttttgtataaatggaatttttttttttttttttttcagatggagtcttgctctgtcgcctggctggagtgcggtggtgtgatcttggctcactgcaacctccgcctcctcccgagtagctgggactacaggcacgcaccaccacagccagctaatttttgtatttttagtagagacggggtttccccatgttggccaggatggtctcaatctcttgacctcgtgatctgcctgcctcggcctcccaaaatgctgggattacaagcatgagcctggccaagtgctattctttatttcagattgagagttgggaaaaactggagcaaataatggatttctttcttgcttaaaatgtatttatatgtatgtcttattatatacaaggcagatttccctggaataaaagtctagaatgtgctgcttaattttacacatgtgtgcaggcaatattatctgtgagtgaaaagtggaataatacgtggattgggtcaactgattatcagcttgttaggagtcctctgtgtgagacatggtggtataattgtgaagttctcactgtatgtggatgttcatgtgaaagatagtactttcttcccgtaaatatcttttgatttccatttgtatggaatcccaatgaatgtatctttggaaaacataatgtgtcaaaatttgtattttgttcattgatctaaatgcccgtgtaactaatcagaaatccaatttggctcagattgggaattttcttttaaaggaaaaaaatttacagaaaagactactggaagaatcatgttcaaatgacatttcacatcaatgtttcttcaatattttggagttgacttggttgttttctcctacctacaatagaatgtgcctgctgtttctctgtcgctcactttgggcttgcaggaagtacaacgggaatagcctgagcttcttgctccctgtataatttattcactttacctgaactgccttacctgcagttcatagtgagaacacctgggcttgtaacttgcctccacttttaagtgtgatagggccaagttgctttacctctctgggcgtttttctttaaaacgaatgggttaaactagatgagctcagaagtcccttcctgccctaacattatcttctatttttattttcctgtggttactactattagggtcagacatgtgaaatgtgagggaccatttagagatttagatgttatatttttggattattacagagtatacacccaagtttaggacctgtgtcatttttagtgtccccaccccgtttctatttctgttccatttgtctttactttctttgtaatcatctcattttttttccactcttgaaactcacaactttccagtccatgagcaactttgctaccatccccctcaaaaacaaatctatttaaaacaccctcctagaaaagcctctgaaccaccttcagctaaatctgtaacgtttatagaatattttaaaatcttaattcagctagagttatgatccccaagcaagtgctgacgaagctatcacagaaatgatgtctttttcaccttgtaggtatcattgttgctaaatcacatcagtacaggccttctgtggggagacagcagggggcaggggcaggactaggggatgggagtagataaaactgtgattctatcctttactttaggtaaaaaatcctaggttatgaaacaaggttctgggccaagcacagtggctcaggcctgtaatcccagcactttgggaagttgaggcgggcagatcgcttgagcccaggaatttgagaccagcctgggcaacatggcaaaaccctatctctacaaagtatatataaaaaaaaaaaattagccaggcgtggtggtgtgtgatagtagtcccagctactcaggaaggctgaggtggaaggatcacttgaggccagggaggtcaaagctgtagtgagctgtgatgatgttaccgcactccagcctgggcaacagagtgacacctgctcaaaaacaaaacaaaaccaaaaaaaacaaagttctctactcttaagttggtatataagatgacctgcacagtgtcacagagatttcccactcagtaaatcactctgaaagagtttgcataagattctgtagatttgcagtatttaatgtggatagtcaatagctacatgtggcaaatggccacttgaaatttggcttgccaaattgagactgtactgtacacataaaatatataccagatcttgaaggattggtaccagaaaagaatataaaacgtttcatcaatattttatattgattacatactgaaatgacaatattttagatatatcgattaaataaaataataatttgataaatataattatttcacttatttttatattttttatgtggctactaaaaaatttaaaattagacataggggtaacgtacttctttgttttttgagacagagtctcactctgtcgcccaggctgagtacagtggcacaatctcggctcactccaacctccacctccttgggttcaagtgattctcctgcctcagcctcctgtgtagccgggattacaagtgtgcaccaccatgtctagctaatttttctatttttagtagtgacagagtttcaccgtgttggccaggctggtctcgaattcctgacctcaagtgatccacccacgtcagcctcccaaagtgctgggattacaggcgtgagccaccgtgcctggcctggctaatgtaattctattggacatgctactctacacttacatggtttggggtaggcagtgaaataccataggtagaaaaggtaattcagtgaagcatccaaatagacagaaacaacacaaatatttttgctggagtcaggagcactatgtggcacagaacacctcccagaaagcagaaaatttttctgcctgaaaaccaatgtatatgtaagaccccaagtaaaaaacaaaagcaaatgagccccaaactgtcttccctcagctttgcctgggagctgctatctttgcacttatttttctagcatcaggatattagccacatgagggagccaagcatatttgtctcattttaggcatcattcttttgtggttccccccaccccaggtattgttgagtctgtccaaagctgggtgagataccacacaagtcttgcttccctcagtgtgctgcttctctcggccttggtggaggctgagcctgttgccggtacccaccagcccagtaggttttgatgctgcctcctgaaagagattgtatttgtttcgttttgcactagtcacagttgttgtttaaactacatcaaatttggggggagaatatttgcctgtgatggaaagagagatagatgagttattgcttcaagtgttttaaaataaaagctattctcacacacaaaaaaaaaaaagaaagaaaaagaaaagaaagggagctcaaatcaggaggaaatggtggtttttcctgtaagtgaggtttcagccagacacattttctttttctttttttcttttctctttttttttttaagtcagtagtggtttattaaatggttgtatcacatctggaaaacattattcaaaacatttattcagcatacttcctgttcatattttagaagatgtaaagcaatgaaatttgctctaaataaatggcattttttttgccattatttggcatcttgccaggttactttttacatccaagttcaagtgatattttgttctcaaaataaaataattttcaaggtttggaagtataatgcgaaaattttaacagggattcttttttttttaattatactttaagttctagggtacatgtgcacaatgtgcaggtttgttacatatgtatacatgtgccatgttggtgtgctgcacccattacctcatcatttacattaggtatatctcctaatgttatccctccctgctccccccaccccacaacaggccccggtgtgtgatgttccccatcctgtgtccaagtgttctcattgttcagttcccacctatgagtgagaacatgcggtgtttggttttctgtccttgtgatagtttgctcagaatgatggtttccagcttcattcatgtccctacaaaggacatgaactcatccttttttatcagccaggcacattttcaatacagggtacataaatgggaggactcagttaattagatatttagtgtacacccatatatgactagaacacattcttagacttcagtgagcctacatggcagtcacgggaggtacatattaagtaagttctgggtctttgtttcctgctaggacaaatagttaacaagtggctgttctgtactgactacttgctcaggcctgggttaagtgctagggaggtgcaacagaaacttaaaagatagtatctgtcatcagataggaaggaaaaacacatgaaacaatcagatgctatatgcaaagtagtaaacagttggatgtcccctgggatgtacgtgccgtaggagttcagaggagaaaagggccactgggccccaggatggtcaagtgggcttcatgttggggatggggaggcagtggatactcagagaatttatattgcattcagagaagaactaacaaaaccatggaggaggaactggaaaccttgggcttcaaagcaaagtgaagtcaggctaaggtaccggtgatattacgtgtggctaagatatgttttgctctcactcttttggaagcttagattaaggcaggcacgggtcatttgccaggtactgtattttattaaagccacactataaagtgaggcagtccttttatgatggatcctaaattggatgggaatctccaacaaaatagagatatgtgccatggaggaaaataaagcagtaaagaagtacaggaagtgctggggtggagggaggtggccaattttaagtggtatcatcagagaagagctcaaagagaaggtgatatttgagttgaacctaaaagacgtgagggagctgcccaagaggttacctggaggaaaggcatgttaggtagaggcatgaacaagtacaaataccccgaggtgggagtgagcttggcatgtttaaggaaacagcaacgcagtctgtgtgtttggagcagagtgggcaagcaggagagcaataagagctggggtgggagatgtgatgatgccaattgtgtggccctcataggccaagaaggccttttgaccagaagccatttcagggttttgatagaggagtgacatgacccaacttatgtttcaaataattactccagtgactgcatttaaaaaacactgcagggcaaaggcagaagcaagttaggaggctgctaccattacctgaacaggagctggtggtgacttggatctgggtgggagcagtggcggtggtaagaagtgatcagactcgggatatgttctgaagggagagccaataggacttgcaaatagactggctattgggtatgagggagaagtggagttgatgctgctgctgaggtttttggctagcactgaggaccttggctgatcccagaaaatccaagttctcagaactagagtcccaacctggccctaaatgtcccaaacagaactcttcagaggatggtctgggttatgttagcatttgtcagagggttcattctccctcatcatatccacactttatgagcatcagttgggcaattaacatattcctgttgtttaaatttgcttgcattaattcaactgtaagatgaaaacattcttctgaggatttttaagccttttacaatactaacctcttttctactgtatttaacctgccaaaacatgtgtccacttctttctcatgccaggtacgctccatggtgagtgactttgctgttttcctcactatcttcacaatggtgattattgattttttgattggagtcccatcaccaaagcttcaagttcccagtgtgttcaaggtaaacagatctcagagtacttggtgcactcatgtaatttcatacattctgatgccaagtaaatttcaaaggccttttcatatcctaatcctgagttttacagtcccctaaatctgaaccttgctcctcataccttgtcatgtagaaaagcaaacttcagacttggttgaattcaagacagaaaagccagagaacagaaaaaccaaggttgtttaatgaatgaaaagtattattattattgttattaataccacttactgttcttaatatgttaatatttaaacaatggaatgtgcacatttacataaatatattcaagacactgtggaaacatgggtctctggaacaagcctcgttaacagcactttcattgagcatcagctgtataagggcactgggaagaatgaaaaaggtaaaggacttggcctgaaccttcaaggatggtgccccttccttgaagggggagaatggaactgagaggagcctcatcaggagtctagggcccctgccggagtaatcatgacatctctttcgaaatcatctcaatctgatttcattgtttgtataactctctctaatatatggtatttttcaagaaactatacaaaaagtcaaacaaatgatcaatacatggggactccaaatagatttcagtttgggagcactgactaagtagacaaagaagatagaaaagctgagctcagttctatagagccccatagggtgaggggagagaaaatctgtgcgtactcagtgactttagaagaattatgaaggaggaaagtgggagaagttggtgaggagaaggccgacaggaataaaggcagtccctgacttgcaaatgctcccttcagttgtccctttcctttctcttttttctctctacccatgaagtaggcctgttgaaataccttcttccatattgtctgaaaatttttaattttgttgaatttgctgaaatgccaccagttggaagtttatggactaaccaatccctcttgtaagtataataccttctagaatatggcattcttgcctttgtgtgaatgagcacaatcagctttctctctaatacctagctgagatcagtgctgcaggaggaatggattttgtctaaaaataggtaatatgggaacattaagcggtccttggaaaggttccaaagggataggcctaagatagtcagaaggcactgaatttctgggacatctgtgaagaacgcctctgggaggtaggacaggggagaaagggaaacgggagaatgtcaaagaaaatgttgctcatgacaggctccattttcaggaggcagagaagaagttttcttctttttgtctctccctattgtatcacatggcactcaactcccaagacccaatctgaaggctagtactattactaggggtatcacgtcattaagggtttatttaataagtttttgtgttggtctgagaacttaactaccacttagaacattgttgttagggaaacatagattctgtaaacttttagaagctaacccattcataattttggacttggtggtgttattaaagagtatttgaatcctagagtcatgactaataaggaaccaaatcaaatataacagtctgtgctttgtttcttgaatttgggtcaactctggtccagttggtatccctggccttttatcctctagcaccacttgccaaaaaagggcgaacttgtcttcctcagagtacactgcaggggtggggtaaggatctaggtgagtttagatatgttgtgaacaccccagtaagatttataaacagttgtattacaggggcattggagaggatcctaggtcaaacaaacccccaactttagccgtcttaggctccttctcaagtctctgatggctggacccctgtttcactattgatgggagaagccccttggagcaatccagtccattcaaagcccaagagattccatgcagatggctccactttgcctttatttatgctgtagacacacattatgtggctctggagagaagtcgtaggagaatagtctaagttatttatatttgtctttagaagtcattaaatttttttgacaacagatacagttgttaattatattttacttgggttaatgttgagatacacttgttttctctctacacagaggtttggaaagtaagtggaaggaagtgcaagattaatgaatatttcacaagaaattaataattgaagattgactgtttcaaaggggattcggaactattactgagcaaaaggggcttgctgcccaatgtgctagaagccaatactatgataccaggtttttgagagaagaaaagttttttatttcaagtttactaacaaggagacaggaattcagctcaaatctgtctccctgcactggctttactgcaataattagaaaatgtttagggggtggattctgggatagtaggttattggtagaaggaaaggggaggtctggaaagtcctcaggcattcatagttatctcttcatgctacctctgggtcccctgtgccaagggggtttcagcaagttgtttcttttcttatctaccatcctgcaaacccaagaatttctgttagtcattggtgtctttaactctttgggaaatggtttcagaacaaggtcatagatttcctaaggagttgctgtatttcatgccttttttttttttttttaagaacctcactcaagaataaaaagaaatatggatattgtgatccagtttgatatgttttaccccaatgactataacttaaaatacaaaaataatatattttcccccttagccaacaagggatgatcgcggatggattattaatcccattggccccaatccctggtggactgtgatagctgcaattatcccagctcttctctgtactatcttgatattcatggatcagcagatcacagccgtcattattaacaggaaggaacataagctcaaggtaaaaagaggttctgacctagaaggctgctgtggcaacctgttacattttcgtaaaattttagggtaagcacatctagaccagaaattgtagaatctcatagaagaggttcataaggggtttccattctttaataacaaagatttctttggagattagagtggaacatggttgtatggtatgaaagcaacgtggactccattactctcctctcacacctgtggggaaggtgattgggtagagttcctggtgatccctatatagctatatgctttgggtcaagcaactgtacagcttgtcttcctgaggttcaggtgggggcctgggccactgtttcctagaggcaggtattctcccactggtgtctgttactatagtttctaggccgaaactggaaccctaggatcctagggaagtaacagagcaggcaagcaatatccaaatctgtcaaggatctgggggtatgtggtaggaagccaataaggacacttacctctaactcccatagtttctaccatctagaatggtcaagatgtggcagggtgtctggttaatcttccagagaagaatggatctttgaatgtgtaagactcagagtcagctggaggcacttggaaaaataatcaatattggcatatataggacaggctaagattcccctttttcttctttgtttcctcctaaccaggaggggctacaagactcctcttggatccctgaaccccttccttcttatccatacaccccttcatgctttgggcctgagacccgtagctcactgttctatgccctactacagctagcctactgatggtgacaaagactctgtttccccacagaaaggctgtggctaccacctggacctactgatggtggccatcatgctgggtgtctgctccatcatgggcctgccctggtttgtagctgcaactgtcttgtccatcacacatgtgaacagcctcaagctagaatctgaatgctctgctcctggagaacagcccaagttcctgggcatccgagaacagagagtgacaggccttatgatctttgtgctgatgggctgctcagtcttcatgacggctatcttaaaggtaatcatcctttcagtcattcagcaaatatcaagggcctgatttgtgccaggaatcctgccaggtgctggaaatacagtggtgccaaatacttacaagtataaatccctgccctgaaagagtttattctagagggataagacagataacatgtagttaagaaaattagttaagaaacaaacatgataactacagaatgtgaatagtgatataaaggaaatacacagtgctttctggcactatagagaactgagaggggtctattttagtaggatggtcagagaaggcttctctgaggagatgctatttaagatgaggtggaggccaggcgcggtggctcacacctgtaatcccagcactttgggaggctgaggtgggtggatcatgaggttcggagatcgagaccatcctggctaacacagtgaaacctcgtctctactaaaaatacaaaaacaaaattagccgggtgtggtggcaggtgcctgtagtcccagctactcaggcaggaggctgaggcgggagaatggcgtgaacccaggaggcggagcttgcagtgagccgagatcatgccactgcactccagccagggcaacagagcgagactccatctcaaaaaaaaaaaaaaaaaaaaaagatgaggtggagccatgccatggatggtgggacatggcatggaaggaggggagaaaagcagtctagtcaggcccttaggtgggaaagagtgatatgtgttctacgaaatatcagggccatgtggctcatgggcattgagtcaagacaagagcacagtgcaatgagaaggaaagagaggcaggggcagatcatgtagggccttgtcgacagtgggcaaggtaacctttgaagggttttaacaggagagggacatgatccagctagtttaaaaagatcactctggctgaggtctagggaagaatagaagcagacagaccagtgaagctgttgcaggtgacagatgatggtggcttggataaggaagctggtagcagggacagataaaaacgcatggcttctgtatagcttggaggcagacccaaaggtctcaattgttgactggatgtggaatggggtgaggaaaatagaaaaatcgaagaaacctgttaggtttctgacttgaccatctggtggagtgtgatggcatttattaagatggaaaagattgtatgatttttgtgaggggtggggctgtgatcagatttggagtgagatgtctgggagtcatctaagtgaagaggctagaggagggttctggactaaaatataaatttgggtataaatttgggagtcaacagcacataggtggtattgaaagccgagggaatagatgagagaactcagggaaaagagacgacgtaaaagagaagtgggacataagagcagagttagaggttggatagaagaagaggtagcaacagagtctcagaaggagctgccagagaggtgggaggaaaactagggggatgtggtattagggaagccaagtaaggaaaatgtttcaagaaagagggattgggtagacacgtcttggaaaatgaagactaagctaaggccattggatttagcaacattggaggcctcaggttatctgacaagagcagagtcagtggattgcattagtttctgctgcctgtgggtgatttagaagtagaagcaaaagcagaagctgaccatgataaaaatcattttgttctgaaatgaaatgattacatgtaagttaaattacaggcctccatgtctggctcttcctccacccctgtctggggatgggcagacacacacacacacacacacacacacacacacacacacccctctttaacagaaatgatgccttttaaatcttccacaatctcaaaaatcttccaaatccttagggatttagtgcattttaacatggaacttttttactgaccagtgacttgaggcaggagttgggggtatcttatcagagaaggaattcagtggaactatagagtagaaatccaattataggtggctaaagagtgaataggagataaggaagtaaggactgcaggcaaatctttcaagaggtttttctgcgaagcaagatggaaaaatggcagtggctagtatgagaagtggggctaaaagagaggttttttttgttttgttttgtttttggtacagatagaggatactttgaacattaaaaaaatgttttgtgggtggaaggcctgcatctgggagattggggtgagaaggaaactttacggctgtattcccaggtgccagccattctggagcactgccttgtctcccttgcctcctcttcccttttttttggcaaatcttcaaccaccccagcctgtaccacaaatgcccttcaagggtgagaactgagagggatgggaaggatttctgaaccatcttcctgtcccctcactttccactcaaccttaccacccacctctcctgacacccctttcccacctcatattccctgtccccagcccaactcccactcccacctggttgaggcaccatctggaagagcctaaacgttgctgcttctccaagatagaaccatgaaggcgcggcagtggccatccctgggctttcccctagctgcttcaggacaattctcttaggacaactattcagtagttcacaaacaacatcgaattggaatgtctaatcactctacagctggaacataaaatccaatgggggattttctaattttttgttttttaaaattttactttaagttctgggatacatgtgcaaaacgtgcaggtttgttacctaggtatacatgtgccatggtggtttgctgcacctgtcaaccgatcatctaggttttaagccccacatgcattaggtatttgtcctaatgctctccctccccttgccccccaccccccaacaggccctggtgtgtgatgttcccctctctgtgtccatgtgttctcattgttcagctcccacttatgagtgagaacatgcagtgtttggttttctgttcatgtgttagtttggagggattttctaattccacaaattagatttgagaatatttatatagtcccaaaaaaactaaattatagtccaatttagttttcagctctgagactttccttgccttgattctataggcccaatttccctacctcagagtcaatctgaagattacctaggttgatagacatgacgtgatcagaaagtcatgttcaaatactgtgtggatgttcaagtgcagtataataatgtcggtgtttccccccagaccattacctctttgataagatacgtccccactcttgccctcaagccactggtcagtaaaaaaggaagcttttttggttcacgttaaaatacatcaaatccctgaggagatgattgtgagattacagaagatttaaaaggcattatttctataagagaggggtgcgtttgtgtgtgtgtgtgtgtgtgtttgtgtgtgtgtgtgtatgtgtgcccatccccatggaggaggaagagccagatgggtgagatgggaagtctaacttacatgtaatcatttcatttcagaaccaaatgatttttatcattgtcagcttctgcttttgcttctactcctaagtcacccacaggcagcagaaactaatgcaatgtgtctgcagctattttgtgactttgtttcattcttggagatttaaaagtgtatatagttttgagtgtgctatgataccaaatttaatttctggcctttcttgtccttttgtcttcagtttattccaatgccagtactctacggagttttcctttacatgggagtttcttcactacagggaattcaggtattgtatggttcagccagggcagtttcttctcactgcaagtttgcatgtcctgtccagggagggacagctccccaagagaagcacaaccagttcttgagaaaattgtttcctagtcttgccacttaggctattttagacatgtatttggatatagggagaaaaacagccatgttggcaggagagtacagagacttccagggtggtctggcttgatgtcatggctccagttattcattaattattcaacagacaatttttttttggcatgtattaaacattagttgctttgccaggtgctagtaaacttggatctgaaaggttgatcaagaaccaaactggctttcactcatggacagatctaggttagtgccaggctaaagtataaaaatggggtgtttaactttgggagagggttcattggcagaagagataggggaatagtgggagttgctcctggtaaggagatgtcacttcttgttatactctgcatttttccatccatcaactattgctctaagtctttcaaaaagaaaaatcaggagcttgtcattgataacttgggtattccagataatataataacttaggctgattattctttgtttgaatggaatgtcctatggccattcttttttttctttttttttttttttcctatggccattcttacatactgagttctactatgaacttgggcaggttatttaatctctggttctcttttttccttattgtaaggatgatcattttttatatatctaggatgttatgaggttttattttatcttttcactataaataatcaatgaatggctccaaactcctaaaacaagtaagaaatttggttttgataataagcaaaaagatgtaattggtttattttgttttcaacaccccctgagaaagagctctcttaggagacacagtgtgggataagagaaagaagtttgaacctagaattagaaaagatggattcaaattttgactttgccacttaataaccttggccaaattgcctggtcttttaaagtctcagtttccatttctgtccagaggaaatggtgttacctacctttcagagcaggtaatgtaagagatatgaattggtctaacaaagcttctgacccagaatgccctcctgaaaataaatgccagttccttcctttcagttctttgatcgtctaaagctctttgggatgcccgcaaagcaccagccagatttcatctacctgcggcatgtgccgctgcgcaaagtgcacctcttcaccctcatccagttgacctgtctcgtcctgctctgggtcatcaaggcatctccagctgccattgttttcccaatgatggtgaggtggtttttaaaaaataaattcttattatcattgttattttttagtggtaaaatattataactttaaaatttaccatttttaagtgtacagttgagtggcattaagtacattcacattgctgtggagctattaccaccctccagctctggaactttttacatcttgcaaagctgaaactctgcacctattaaacactaaatttccattctcccataccctcagcccctggcaaccaccattctactttctgtctctatgtattgattattctaggtacgtcatataagtgaatcacagaatttgtccttttgtgactggctaatttcttttctttctttctttcttcttttttttttttttttttttttgagatggagtttcactcttgttacccaggctggagtgcaatggcatgatctcggctcactgtgacctccacctcccaggttcaagcgattctcctgcctcagcctccctaatagctgggattacaggtgcctgccaccacacccagctaattttttttgtattttttttagtagagacggggtttcactgtgttggccaggctggtctcaaacttctgacctcaggtgatccacccgtctcaacctcccaaagtgctgggattacagacatgagccactgcgcccagcttgtgactggctaatttcatttagcctaatgtcttcaaggttcatccatgttgtagcatgtgtcagaatttccttcctttttaagattgaatagtatcccactgtatgtaaatactacattttgtttatccattcacctgtcaatgatactgttgtaaatatgggtgtacaaatatctgtttgtgtctctgttttcagttctttggggtatatgccaggagtggaattgctggatcatatggaaattctatctttaatttttttctaatcctctagatccacaccctcctggtgggtttctcaattttgtcaggctacatataagggtttgtattcgtgtgttacgttcatgggttaaataaatagcagattactgggaactcctagaagggatcctatcaattccagatgtattaggaaagtagtcactaaattagagagaaatgtacttgaatttaataagcctgatttgcctcattccttgtccagtcaccaattatagctgatgaacagcagtccacccaggcaggattaattctttgttttcctttggctaaaatggccctcatggaaagaaagtggagcagcagttgagatgccctggacatacctttatcggggaaatcagctgtcagattttaggcgagtcactttctctctctgggcctcagtttcctcatttataaagcgagtgtcaggccaggccagagggcaaagacaaaaaccactagagacaaatgatgcaggcccaaagcaaggatttgggtaggggaatgtataggcaaaggatcagagggaataaagatgatcttctaagagaacccatcatcccactgtgaggaatgcttgggtggctgtggctggtcccaccatggcccagctccagcagaggctttctacccacctgctgtcctgtagccttcctgctgacccctagccatctgcagatgatgtgctcatcttttcaatgacagaatccagttagctgctctctaagttgtagagctgttatgatagttaaaatactgtatgtaacacatgttacctggcacaaagaaagcattcaataaatggtgactgttaggattattatgagtttgattttgcttgaaatgtcctagtctgctgtgaaaataaggctttgcttttaagtccaggaaggaaattagtccctttaattcacttttttttttaatttttcttcaggttttggccttggtctttgtcaggaaagtcatggatctctgtttctctaagcgagagctgagctggctagatgatctcatgcctgaaagcaaaaagaagaagttggatgatgccaaaaagaaggccaaggaggaagaggtcatagtccttgcaccaactgtatacctgggggcctcaaattacagaacataggaagggtcatgtgaaaagtcagcatgtctggaatcccgagggttatatttaggagctgggaagattacccccaaagatgttctcagctaagaatggattagggattcttgcttctgtctgttcttaatttttgggtttgacaaccacttattttttcctttgtttacaatctactcaccaggctcatacctacaatgtgaacatacagtatgcccttattagcagattcaatggctcacattctttcaaaaggtctaatttgacaaatacataagacccattatttcctagaatgtttgtaatatatctaattgcaaatggtgctgtggttggcaccatgcaaagataacttgcataggactttctgtcttttttcatttccctcagcacttggcatcttgtcatctacacaatggaccctcaataaatggcctatatgtgcaaagaaagaatgtgtagcaaatgaaaataccagaccaagaaatgagtgagctgggaagtgtttccaaatacagttagtgcctaaaatagtgtcctttgaaaaaacttttaaaagacttttttttaggccaggcataatgggttatccctgtaattccagggcttttgggagttgaagctggaggattacttgaggccagaagtttgagactagcctaggcaatataatgagaccctgtctctacaaaaaaaaaaagaaaagaaaagaaaaaaaatcaaaataattagctggatgtggtggcacatacctgtagtcagctacttgggaggctgaggtgggaggataccttgagcccaggaggttgaggctgcagtgagctgtgatcatgccactgcactccagcctaggctgagtgagatcctatctcaagaaaaaaaaaaaagatgacttttttttcccctaatatcttgaactttaaaaatcttgtatttctaaataagcttcaacaattataaaatataaagtcaatggaagaaaactttaaagagaatattgatagaattcactacataaaatgtgatgctttcaggcatccaaaactctaatcaaaattttaaaataacagataagttgagacatgttaatatccttactattcaaataattcttataaattaataagaataatatgaaattgaaatgagcaatggacatatataatttacgaaaaagaagtacaaatgaccagttgccttatgacaaaaatttcattctcactaataatcaaagaaatgattgtgcagcatctggattttatgaaatgaaaataaatattaaaaaataaaaaagaaatgaaaatttaagcaaggagaatacttttttacttgtcgaattggcaaagatttttaaaagataaaaacaagtgttggcaagactgtaattgaaattggcttctcatacactaaaaatagtaatataggctgggcgcggtggctcatgcctataatcccagcactttgggaggccgaggtggttggatcacctgaggtcaggaatttgggaccagccgggccaacatggtgaaaccccgtctctactaaaaatacaaaaattagctgggcgtggtggcaggcgcctataatctagctattccggaggctgaggcaggaggatcgcttgaatctgggaggcggatattgcagtgagccgagataacaccactgcactccagcctgggtgacagagagagatcctgtctcaaaaaaaaaaaaaaaaaaaagaggctggatgtggtggctcacgcctgtaatcccagcactttggaaggctgaggcaggcagatcacctgaggtcaggagtttgagacctgaccaacatggtaaaaccctgtctttactaaaaatacaaaaaagtagccaagtatgttggcgcatgcctataatcccagctactcaggaggctgagacaggagaatcacttgaacccgggaggcagaggttgtagtgagctgagatcatgccactgcactccagcctgggcgaaagaacaagactttgtctcaaaaaaataaaaataagaaagatatgtggacgtgtttctgacattttatgtgaaaaacatagggaatataaaatggagcatacagtaagactgtcaaagaatctcacttttactaaaacatatacatatacacatactgtacacacacacacgtgcatgtgtgcaccccccacacacgtgaaaaagattggaagaaaatacaccaaaatgtttattgtgttgctctatgtctctctagttggtaagattatacattttttgattaattttcttcctccatatttattgaatccttactctgttggtcactgttccagatacagtagtatacaggacacagacagtccctgaccgaccacatggagcttacattctcttggaggagacactgtcaacaagcaaacaagtctatatttgttttcttggttatagtgctataattctacacacacacacacacacacacacacacacacacgtatataattttaggtagtgatatgttttaagaaggtagggagtgagggagttactttatttaggatgattagagatgacttctgaggagacatctgagtagagacctgaatcaagtgagaagcaaattatgagaatatctgggagtaagaacattccagggcaggggtacagaaaatgcaaaggtcttgaggaggaatgagcttggtgtgtttgaggaacaccaagaaagccagtaagactggaagggacagagtggtagcagggagaccagctaggaggctggcagcagctcaggcaataggggagggtggcttatgctaaggtagaggtgatgaaagtggctgaattgggtacttattttgaagatagagctgacaggttttgctaatgatggtgggcatgggtgaaagaggaatcaagtatgactcttagatttttggactgaacaactgaatgaatggttgtgctatttattaagatggggaagaccaaggagaacagcaggtttaggaggaaaatcaagagatctcctttggatgttaagttcgaggtggctggtagacattatattccttattttccaaaattcctgaagtaagtacatatttgttaacacgtgttactttataaaattattttaaaagctaaatgaaataaaagaaaaaagtgaagactttttctccacctcatagccaacattcatgttcatttctttatgttgttttcaattttttaacatagttttcatataactatgataattatataattgtgagtttgtatttatatatatagcacatatatattctgatttttcccctcaacctgatttcataagacactttcatgtttctatttgtatcatgatattttttaaatggatgtataatgttctatagtattatctcatacttaatttaaatatttttcctttgttaaaatttttagttgttttatattactttgaacatctttgtacagatagttttttctctgtaattattttctttaaattagtgggattattttcttttctttttttttgagatggagtctcgctctttcgcccaggctggagtgcagtggcgctatctcggctcactgcaagctccgcctcccgggttcacgccattctcctgcctcagcctcccgagtagtcgggactacaggctctcgcccctgcgcctggctttttttttttttctttctttctttctttatttttattattattatactttaagttttagggtacatgtgcacaacgtgcaggtttgttacatatgtatacatgtgccatgttggcgtgctgcacccattaactcatcatttagcattaggtatatttttagtagagaccgggtttcacggtgatagccaggatggtctcgatctcctgacctcgtgatccgcccgcctcggcctcccaaagtgctgggattataggcgtgagccaccgtgcccggccagattattttctaagaaaacattttattatggatttctaaaaaaagttattttagattcagggcatgtgcaggtttgttacatgggtgtagtgagttatgctgagctttgggcttctaatgatcctgtcacccaagtagtgaacatagtaccccataggtagttttccaacccttcccctgtcttccgccttttggagtccccagtgttttttgttcccatctttgtgtccatgtgtacccaatgtttagcctccacttataaatgagaacatgcattatttggttttttgttcctgcgtcagttcacttagggtactggcctccagctgcatccatgttgctgcaaaggacatagttttgttctctttgtggctgcgtagtattccatggtgtatacatactacagtttctttattcaatccaccattgatgggcacctgggttgattccatttctttgctattgttaatagtgctgcaataaatatatgagtgcagatgtctttttgacagaacaatttattttcctttgggtatataccaagtaatgggattgttgggtctaatgctagttctatttttagttctttgagaaatctccaaactgctttccacaggggctgaactaatttgcattcccaccaacagtgtagaagtgttcacttttctccacaaccatgccaaagtctgttattttttgactttttaataatagtcgttctgactgatgtgaaatggagtctctttgtggttctgatttgcatctctgatgatgcatgatgttgaccagtttttaatatgtttgttgactgcttgtatgtcttcttttaagaagtgtctgttcatatcctttgccctttcgcttctatgcaccaataacacccaggctgagagtcaaaccaagaacacaatcctgactacagtagccataaagaaaatgaaatacctgggaatacacctaatcaaaaacatgaaagcactctctagagggagaactacaaaacattgctgaaagaaatcagagatgattctctgaaaaagaagtcagattagaaatgattctctgaaaaagaaatcatctctgatttctttcagcagtgtgttttttgtttgtttgtttgttttgagacagagtcttgctctgtcgccaaggctggagggcaatggcatgatttcagctcactacaacctcctgctcctgggttcgagcgattctcctacctcagcctcccgagtagctgggattacaggtacctgccatcacgcctgggctaatttttgtatttttagtagagacaaggttttgccatgttgaccagtctggtctcgaactcctgacctcaagtgatctgcctgccttggcctcccaaagtgctgggattaaggcatgagccactgtgcctgacctctttttttttttgagatggagtctcgctctgtcgcccaggctggagtgcagtggtgttaaaaactggtcaacatcatgcatcatcagacatgcaaatcagaaccacaaagagactccatttcacatcagtcagaattactattattaaaaaatcaaaaagtaacagacgttggcatggttgtggagtgcagtggtgtgatctcggccgactgcaacctctgcctcccaggttcaagcgattctcctgcctcagccttcctagtagctggaactacaggcatgcaccaccacgcccgactaatttttttttttttttttttgagatggagtctcgctctgtcgtcacccaggctggagtgcagtggcgccatcttggctcactgcaagctctgcctcccaggttcacgccattctcctgcctcagcctcccgagtagctgggactacaggcgcccgccacctcgcccggctaattttttgtatttttagtagagacgggggtttcaccgtgttagccagggtggtctcgatctcctgacctcgtgatccgcccacctcagcctcccaaagtgctgggattacaggcctgagccaccgcacccagccagcctgacgtctttcagcagtgctttgtagttctcttcgtagagatcttttaccttatggattattattatttttttattttttatttttattttttttttgagacggagtctcaccctgttgcccaggctggagtacagtggcgcaatctcagctcattgcaacctccgactcccgggttcacgccattctccgtctcagctgggactacaggcgcccgccaccacacctggctaattttttatatttttagtaggaacgaggtttcaccgtgttagccaggatggtctcgatctcctgacttcatgatctgcccacctcagcctcccaaagtgctgggattacaggcgtgagccaccatgcccggcctaccttattgattattttaaacctacaaaggtagaaagaaaaggcttcttattgttaataatttgtttatttgaattagcatccaaagaagagccatatattgcaattggttgatatctgtcttaaatctttttaggggttccctttccatttttttaaagttgaagaaacagggtctttgacctctagggcttctcaccatttagattttgctaaatgtgtcccttggtgtcatttaaaatgttcttctgtctgctatatttgtagtaaattggtcattagctctagaggtttactcagattgacattttctttttttcttttttgaatgccattccacatgtataaatatctggttgtctctcattttgtggtaactcaagtctatgaaagaacctaattatattctttataataaatgcacaatgaaattaggtagaaattgtggtagaagaatgggctggtgaacttatggtcttacttggtccaagatataataatgtttctttttcttccaggaggctgagaaaatgttagaaattgggggagacaagtttcccttagagagcaggaagttactaagtagtcctggaaagaacatcagttgcaggtaaaacttccaaacaccaaggagtttacttttgggttattctctaagtgttctggctttgtggtggtggtggtgtcacaagtgcagctgctggcataaagagctaaatattcagcctcccagttccatcctgtgaaaataccttttccatctcattgtttattgaatacctgctatgtaccaggcactgtatcaggttatgggaatcacaagaagagaggtaagaaagccaatgtactgagtgcctcctttgtgctgggattgtgctagagggtttacttatgtgttgtcagttaacctgtactcatatgaatatcactatccacatttgtataagtgaagaaactaagtcttagagagttttaggtaatttatccaaagttacaatgttgctgaatagaaagattaggattcaaaccctggtcgtcttctattcctcaaaccagtgctccttctgcctttctttgccaccttccaaagatgaaaaggatgtggtctttatttccagagagttctcagcctagtaggcatgaaatccaatgcttgggcaagcttttggggataggcagaaatagtcaatgttagcctggcttgtggcatctgtagttctgggagcaagggggaattgaactgggatcatgaaaattccttacttctgccaatgattttagcccctttctctatcaaacctattgctcaccacaaatgacaggaagctaaattggtccattcatggttttactcctagcatcttgtttctgaattggaagagatacacatagcacttgtgtacctctaggtaccataagctgaaaaacctagaggtcaagagggagcagagcaaaggaaaagagcaggatatctgggtcattgagattctgaagaatttactgctgcatcactgagttggttgtggtttatactgtgggggaaattaggacagtctttttcgtaataatagtcttggttcttaataaactttctacgtgttgttgtggaaggagccgtgagcttgatttatctggtggcaaagtaggaacaatgtttcccctgtaacaggatgctgcctcctctcttggcattttagaaggagataatctggcttgcagcaaacatcaaactattctgtttctaggaaaccaagggctgggttcaaggtcttgattctctacttgctgttgtttgaccttggatagtcacttagctctgagagctttcatttctgcaccttcaaaatgaggatgttaataatctctgttgctatgatagttaagatactaggaaagtcctttgtgaactatgaatagaagagatttggctgtttaaatgggaaaatgaatgaaaaatgcctggcatgcagcaagtgctccgtaagtggtagttcctgatgctacactgttgatatcatagtgttgtcagcagcatctccagtgaggcccttcggaggagtgcacagttgtgggagcaggactggctgccacctggcacaccagcccagctttcagcaccacctcatgggccaccttgccattctgacctcagtggctgcaggagaaagatcagactccatcttgttccccgagttcctgagagctgttggctgcgtggtctcaaaccccatcttctcccttctattgggacagtgatcattatagactgtggtatgtattttacttgtatgtctgacattcactgtcctaatgattgatttcagatgtgacccctctgagattaatatatctgatgaaatgcctaaaactacagtttggaaagctctcagtatgaattctggaaatgcaaaggaaaagaggtaaagagaactgtaacatctggtttttatttatttctggcttttgacaatggcgatattgaaggtaaaatgtgttttagttgtaaaatggaatttgtgtaataaatagcacttccaggaactgccgctaaccacataagaatagctataagccttaaaaaagtaaaaatgttttctaaatatttggtcagggtgttttaagcagcccgtttacacaggtccaaggtcaggaagggattattttggcatataaatttgctttgcctgtttatttcctttaatcctctttctagttctcatttcagaatctgaagggcatgtctctggttactgcaaccacacaaagtaggaaattgctaaaatattcagatagtgttgatagtactgatacattctttaacctatttcacttgttacataatgagaactaacaacaagtaaagatttttgaaatattaaattgtaactggttttttttttctttctttctttttcttttcctttttttctttttttgtttttttgagacggtcagtctctgtctcccaggctggagtgcaatggcacaatctcagctcactgtaatctctgccatccgggctcaagcaatccttctgcctcagccttccaagtagctgggagtacaggtgcatgccacccctgccagataacttttgcatttttatagagatgaggatttactgtgttgcccaggctggtctggaactcctggactcaagggatcctcctaccttggcctcccaaagtgctgggattacaggcgtgggccactgcacccggccgtaactgtttttctgttttgaaaccaaataccgtatatcatttactaatagcatagatcaaccttaatcaggttaatgaagaaaatggaagaacttgaggcatttttgcctgcattgaggtaggctatatgccaaaatttcttgaataatttagtccaaataccatttaaatataagtaaataactgaagacaaaatctgaggccttcctaaagtcaacttttctagttaaaaaaaaaaagctaggaattaggagacctagtccttcgattaattccttgtataacttggcagaccactgtttctggtgttcagtttactcagcaggaaaatggagataataataactaactgccccactcctgaggctgctccaaggagaaactgaagtgctctgaaaagtcacagccaccagtgggtggtagtggtgatttatgtcttcatcgaatgggttaaaatgaatctctgctgaatgtgagtgaaatatagaatcttgtttccttcggaggaaaatccaggcagctgtcgaaatgtataacgcacatggttatttttagttgagaactagtctacttgtaaatgaacttaaaatatagccagatccaaattgtggtgacatcttcaaagtattgtgttaaaaggaggaatgaatcatatgttccctttttgtctaattgtaacacttttattcagtctcttcaactaagagtctttgctgggatggaagatttgggccgtgtggtgcctcagggaagttctggttacagagaaaatggcgagtctctcagagaagaagcaagaccaagtctggccctgtccttggtcatctcaaagccatgccgaagcattcagttattcttggtgtgcattggaaggcatccagctatccccataccagcagccagtcaccagatgtgaatgtggaagcagaagaccacctcctgttggttcttctcctcttccttctttttctctttagaacggccaccattgaagacctagcttcccattttccagacgttttctctgaaattctctgctggcctgccaagccatatggattcattctgccactgaggagtccttcagtgaggtccctcttcctaaaggacagagtggggagtaggaggggaacagagaggacatcctctctggctctccagtgctcttagtgtctacaggctcctaggcagccctgggccttggtttgattacctcccctgggggatgctggtcagacccagaggttgtcaggaggtcagctaccaggaagatccatgatctgggcattggcagtgcctgccaccacagccaggaagatgcctctgacctgggtgcatctccatcactccttagcagcagcctgcataactggcaagaatcttggatgatacaagagccaagaagggacatttgagttgtgtcgcttagataggaaagggatccagggaaaatcaacagtaagtgaggatgagcagtgtctcttggttttcattgaggatagagtaagagattgagtttagattgcaacagaaggaattagtttagataccaggaagaacttcctagcctgaagatttgtcatagtgtctgctttctagatatctgggaaagatttgataatagttgtttgtgaatagaaaggaggatatgatgtttttattggccattttgcgggactcttcgacttcttgctgctgtctcttgaggatacattccaattccatcctggcgagatccaagtgcttacgtactgtctccttagctgccttagagtaaacgatcatcagttcaatggaccaaaatcaccttcagccatgtggtttcttcatcatcatggatttcttttggttgacaaacattctggctctcagatgcaaaaagtcacactgggaaatgaactgtaagtggtgaaattagttttggtatttaatttaaaactacatttatagtttttctcttctcttctatgttgcaatgaatgtaaagtatttgggatccagtgcttataaacctttccttcctttgtgcacagaatgtaactagcaagcccattagcacccagataattctatcatgttagtttcccatcctggaaaatctttgtacagtgggaagttccccgatgtgtttttctttcttaggtgaagggttggctatatcactttattgaattttgcattccttagacttttaaaatatactaatgtattctagtcttactctaaagacctttgatgttaaaggaatccttcatttatttcatattccctatctcatagggccacaattattttaatacagagatgattttcaaaatattttaacaactggtacaggacagatgccagccactcagaagggatgcctgctgtaaacaagcagtatgtatggttgtaccaatgcctattggctgaacattatgctactttcagatattaaaatggtgttcctttgaatcgtgggtattgttcctggtttgtctcatttctatcacaaggctgttttgggcacagccttagcttcctttcatatatatatggtgcagacaggataggtcatgcttcttggaacctatatgggcattaaaatcttcatgagccaaagcttcacattttagcactttaggataactgtagtaattgtactcatttacctacctaattgggaagaattaaaaggcagcccatctggaggataagctttcttgcagacttttcccttgtccctctctggctgcctccttgagcttgccactttttcatcttcattgttccctgagaacatctcccctttcttgctctatcttgcccctcccatcttttcctgccacctctgtgtggggaggttgatgaccatttcacctctttccctagcctcagcacagctgtaaggagtgtatcaaaactgggtgagagtatcactcagaaaaatgcctcccctaacacacggatgtcttgtgctgccttgaccgcttgaggggaggagccttcattaactctgtgtagtgcaggtacaggaccacctgtgcactttagggtacttctcgagctagaccctcctggatcactgcgccttaggaatgttagctactttttaaaaaaaatatgatttggtgcgttgttggggtgaactccatggggaagattgtgagtgaagatgggaaggaatttgggtggttttgccacgaggtgatggttggggttgggcgaatgggttggatgatcctggctctgtgggtgtggtgctcggttgcctccgtacagttgcagttcacctttgtgcatggtgattaccagtcactctagggattgtaggtcccaacagcggttccagcagcctgcacagctggtacgaggacagctggaggagggtctgatatccctgcaagtgatgcaggataaaacttcccggccgggcgcaatggctcgcgcctgtaatcccagcactttgggaggccaagatgggcggatcacgaggtcaggagatcgagaccatcctggctaacgtggtgaaaccccgtctctactaaaaatacaaaaaaattagctgggcatggtggcgggcgcctgtagtcccagctattcaggaggctgaggcagaatggcgtgaacgcgggaggcagagcttgcagtgagccgagatcatgccactgcactccagcctgggtgacagagcaagactccatttcaaaaaaaaaaaaaaaaaaaaacttcccaataggaggtattccttgatggctctcgaatgcatgaatgatatatcaatttgaagtttctcgacctttccatcaaggatcttgaattttttctcaattatgcttgctaatgtgtcaaaggccaagtacactgtatcaaacttgccgtctgtaagatgcaagatcaatctagtgtttcagccagttcactactgacatcagactcaactttgtcccctctctttcttttcatgcaagagactttaagggtaacctcttcagttgaaactgtcttggaagtgcagccctcctcctgtgtggctagagaaagagatggcaccaggatctcttaacggcaagtgctcacggggcatgggtgattttgtctagtctggtccttttggacgtggtgatttcctgtcatcctcgtggtctgacattgcttctcactggatactggttgtggcctttgactcattagctgattgttggatctctttgtgaggttcgattttttaaaaatccatgggtccctatggactgtcacctgttgcagatgatggtgattctcttcttttttttgtctccaatagttgcctggacgacttcatgggtcagtccacatgattgcaggatttcccattgttcatctgtgaatgttgattggccaacctgtctgagctttcagcagatgcatccttgagcttactttcaggaattcctcctggaattggttttccttggtggtaatttctcatggtggagcttgtttctgaggcatggtacagtgctgcggaggcaaggcaaggctgtcatggtgattttcacagcatctggatggcaaattgccttcacgtagggaaaccacatgggactgatagctttctcaagggatctccaagcatctctgaatttggggatttcatcagttactcctggaatcaaaatgagtgtggagtcataatatatattttttttgagacaaagtctcactctgtcgcccaggctggagtgcagtggtgcgatctcatctcactgcaacctctgcctcctgggttcaagtgattctcctgcctcagcctcccaagtagctaggattacaggtgcgcaccaccatgcccagctaatttttgtattttagtagagacgaagtttcactatgttggccaggctggtctgaaactcctggcctcaggtgatccacccacctcagcctcccaaagtgctgggattacaggtatgagccactgcccctggcctcaaaatctttaaggaagttatttatcgtcacaagtgttgtcatctgtgactcatgggccacttgatgaacctgaaccattagtggttgtccagatcctccaactttttcaggcagtattccaatcagggttttacgacaccagggtatcccaccttttttgcaacataggcagaaacaccaagctgtgggtaattgatgtgcgtgtcactgattcctgcaacagctttgaatgtattaaatctgttttcaacagcccttgcataggtgttatctctcaaatctctgtaaagagcactaagagtatgtagtgttgcatgatataatccaagcctgtgggctgtgtcatccgggattgttggaattttgcatgtgtctgttccatatcccgctggtaaccagcttacagaccttctgtcaggttggcttacattatcatcaacaggttgccgtagtgatgatatgatgctggacacaatcattgtgcactttgttaatttggtatggtggtgccacacattatcactgtacagcattaacaaggctggaatatggccctctgctgtagggggcgtggcacctgtgacttgcactggaataagtaggaggctttccccaaaggatatggagactgatgtgtgctccatatcttgaggggagctctcttggtttcctttggccgggtctgttagttacttttgaaggccatgccaacccttttaggccattaaatttttctcaaacaatagccagcctcatttctgcttcatctctgtggtaggaaccattccctactcttactccctcctcttgtccaacttccaccaaacactcaatccgagtcctggctgctttcttgcttaggtctgtggctggtcactgtggtgaaagagtcaaggtgggcagtgtttggggtaggaaatgagtagtggtgaagcagcagcagtgtgtgtgtgggtgtgggtgtgtgtgcatgcgtgtgcatttgcatgtgtgtatgttgacaaatgagagtgtagccataagatttcattgttactactagtctttgtgtacctatctggagggacattaaaaaaatatggccattctcccatctagggggttcccatctcagacttctctgataagagtaatttgagaacaaatacagattcatctatgggaaaagatgtttaaactcagcatgaaggagaaacaaatttaggagtggaaagcaaggcaggtagttaggtgatttccatgaccacatttgcttgggccagggaagtggtgcacctcttttataacaatgggagatttcagaaacagtttgagtgttggcagaccaatgccctgataagcttgtggtatagaggtaggaagggagggaggccagagattagataaaatgatggtgggtgggatcttagctctaaatgaaaagaactggacttactaagtgggtggattacttgctagccataacttttagggaagggtaggtctggagagaaggtgaagaccagcagaaatatactgtgaaattgccaaatatgtttggttgcagaaaacacagcctggctctttgtggctagatgtgacttccaacttctgaagacaggattgccaagagatgtgatctttccacatacagctcctgtccccatctctttatgtgtagagacctggatttggggtagtggggtagtaaaccatatatttccaaaagatggtgtgaagagtcgtttctcttcgtctgggatgtgattggcttttgttttttgttttttgtttttgagacggagtctcgctctgtcgctttgtcaccaggctggagtgcaatggcacaatctcagctcactgcaacctccgcctcctggcttcaagtgattctcctgcctcagcctcctgagtagctgggactataggcgcgcaccaccatgcccagctaatttttgtatttttagtagagatgggatttcaccatgttggccaggatggtcttgatctcttgacctcatgatccacccgccttggcctcccaaagtgctgggattacaggcttgagctactgcgcccggccagtgattggcttttaaattaatcacaaatgtttgataaaattctggtatgtgctaagtcccaggcttggttgatatctcagactatgatagctgtgaccttcaagaaatttctggcttggggaatctgtagtttctggttgtccaaaaaagatagttcttagtcctactttattttctacccactcaactctccagacttccctcttagtaaaggaattcataattctccctgcatcttctctgtttatttcaatgtccatgttctgagtctcaagttttcctgaagcacaggagcaggcttggccccagagcccctggctttttcaacgagcatcagaaatgctatcaatatattctctctgttgctttatcagcttctctaaatttattttgtaaggaagttagcacctccttccaggactttaaacagttgtctttgccaatttgttcctggattttccttgaacttctcaggtttccaagccacatcctagcagggcatccaggagccttgcactgaacctctcagctcttttgactttcttctggtcataggtgttgggcctcccattaggtagaagtcctttgagcagacccgaaatggccaaatgagacatcatccaagttcctccctcctttactgtctcggctttttcaagcacccctttcacctctcttttctgccttttcctcagtctgtcaagttctttggaggaaagaagttcttggtcagaggtcctaaaaccaccaccagctgggggtgctgagaatggtgaggagttggacagtcccggggcttttttgaaaggggactttatggtcatttcccctgtttagggtgagggactaagaattctcaagccttcagtttcatccatatttcaatgtaagcagaaaagcacatctcaaagccaaatagaaatgattttctactaagcctatcctttgtgattcttggttcccttggtctcttaatattaattatagagaatgggcagttgagtcagttaacatcttttcatcagaaaggagggtaatattcataaccaaaagagatgtaaaggaagtatattactgcttgaagtgtgaaaagaggaaaggagtgttatgtgaaccttttcagtagggaaattcagaaaatggaatgattcatccataggcataattcttttaggagattctgtgctcaaagggaagggaatggtttctgatccttctgaagagaaaaggaatagcatttttcttaaacctaacccagtttcagcattggagaatacagaactttttcttctagctgatggcattaatatttcttgagagagagaactcacccatggcacttttctgagcccagcagaaatcagcggagcttgggcttcgcttagcaggtttgcaattgacttcaacatgcaggcttttcacatgtgcaataatgctggaaacagaagcaccaaactgattgtgcaattactccttttgtagaagaggccaaaatcctcctcctccttcctttctcctatattcactcctccaggatcataaagcctccctcttgtttatctgtgtctgtctgtctgattggttagatttggctgcccttccaagctaatggtgtcaggtggagaacagagcaaccttccctcggaaggagacaattcgaggtgctggtacatttcccttgttttctatgttcttctttctagtgggtctcatgtagagatagagatatttttttgttttagagattccaaagtatatatttttagtgtaagaaatgtaccctctccacactccatgatgtaaatagaaccaggaataaatgtgtcattgtgataatcccatagcaatttatggtaagaacaagacccctttccctcaccaccgagtctcgtggtctgtgtctgtgaaccagggcaggtaattgtgacactgcatctcatagaactctgcctgcccagatttttgtgtgctcacctcaatgggtgaaaaataaagtctgtgtaaactgtttgtacctgtggtgttctttgagtccaaatgaaggggctgagccaatgctgaccaatttcagagcgtgtgaatgagagtgtgaagatgggggaaaaaggtgtggtgactgctgagaatgcctaggagggatgtgtgcatctccctggtgcagagcatgaaggaggctgtcaggacctctctcatgggatggctaagcttatgttggcggaacaggacagcctgaaaagaaagctcattctgaagatacaacaggctgatgagagtacctgttaatatttagggactctgctgcctagaaattcagattttaaaaatctgtggtcacgccagagttggcttttttgggtgggggaggcatgttgtgtttctcttcctctgatatcccattgttggagacttagagaagagggggagagggaagcaatggagggagagtagagcggccagtgagggggtgaaaggaaagggtgagggatcccagcagcagctttactgagtgccaaggaaggcacccactgagaacgtcctgaacatgtggcaccatgtggacatttattacacagccagtgccagcacagcctgtggcctacagacagagagctcactagttctgaggccttttgctatcttttggctattctttaccccaacagtacacacatcataccctttgtctcacagagagacacgcttagattgcattgagtagagtatgggaaggctgctcctgcaggaaacagagccagttctgatgccttggactgtggaggggctagggtacaagtgcagagagatgacatgtatcattttcacactcagggttgttaaggattccattaattgatatgagaaaagtgcttacaacagcacctggctcatggtaagcacatagtaagcaataaaaaatttggaggtaggtgattcctgggttggttaattcagcaataatcctattagggctctggtcagcttctctgcagttctcttgggttttcccctcacagtcacaagatggctcctgaagctccaggtgtcacatctgcagcataacttccaaatgcaggtagggtgagagggttttctagcttcccccattctctctctaaaaaggggaaaatctttcccaaaaggccaccttcctcctatgtcattggttataactgaatcacatactcatctctaagatgggaaaagggagatgggattatcatgtttggtttgaacccattagacgcatcctgtggggttgggcccatcttccgtaaccattttgctgctctaatacttgtacaaaatcagggttctgttagcaaaggataggcaggagttgcgagtgattacatgtcccaaagtgactgccagtggacccaggaaaacctgcaccacggggcctctgcagagctggagccgcagtgtagagggccatgaacctcagcagcagggatgccaggaggccaagaaactcctctgaaggtcagtggggagatttctaacgcatca

SEQ ID NO: 558 - DNA, 42992 bp, Homo sapiens
  source 1..42992: mol_type = genomic DNA
ccttagatcctatttataattaggtatcttattgacacaaacaatgcattctgtcagtcttgtgatctctgctttgacgttaatgctggtcatttgttgtgtctaagctgcaaaagggcgtgggcataacatggcatgtttgacgtcccttcccatcatagctggaaaccctgtttttaaggttccctggggtccccttggccaaaagggggtccatttagttggttggggggtgtaggattttatttttagtttacagttgttagccctgatgtggaccatttccatcctatctaggtttaccaagattcaaaacacgaagctgaccatgaagcgggacggcattgggtcagtgcggtaccaggtcttggaggtgtctcggcaaccactcttcaccaatatcacagtggacattgggcggcctccgtcgtggccccctcggggctgacactaatggacagaggctctcggtgccgaagattgcctgccagaggactgaccacagcctggctggcagctgctctgtggaggacctccaggactgagactgggctctgttttccaagggtcttcactaggccccctagctacacctggaagtttcagaacccactttggggggcctcctgcctgggcaggctcttcaagtgtggccctctttggagtcaaccctccttcccgaccccctccccctagcccagccccagtcactgtcagggtcgggccagcccctgcactgcctcgcagagtggcctgggctaggtcactccacctctctgtgcctcagtttcccccccttgagtcccctagggcctggaagggtgggaggtatgtctagggggcagtgtctcttccagggggaattctcagctcttgggaacccccttgctcccaggggaggggaaacctttttcattcaacattgtagggggcaagctttggtgcgccccctgctgaggagcagccccaggaggggaccagaggggatgctgtgtcgctgcctgggatcttggggttggcctttgcatgggaggcaggtggggcttggatcagtaagtctggttcccgcctccctgtctgagagaggaggcaggagccccagggccggcttgtgtttgtacattgcacagaaacttgtgtgggtgctttagtaaaaaacgtgaatggagcagctcccttgtctgtttgggggtgggggtcgggtccctgaacgtggttaccctgagtgtgttgtggtggaagggcacttggggaacctggcccaacaagtaaacctgacccgggccatcctggttctccaagcgctgccactccctaggctttcactggccttaaggggaagtttgtccttgcactgcttccgggacagtggaggcgacgaagtaataaacccgtggacccagatttctcaggtcttaacacgttccctgaggcctaaaggtgcccagggccgagcccaaagtgcttgggtcagggctcggtggagcgccgaggtgagtctgaactcccagccggcacgcgccgcccgccggaccaaacacgggagggggcggggccctagagtcgcggcgtggtttcccgggtgatggccacgcggaagaggtggggctagggccctggttcccactgcctggtttctgggcccccggcatccgagtcggccaaaagccgggcagaagagagcgccaaggactggcagttccggaacgggcaatcccagccgaggggaccagcggcagagcacgggtggggcttgggagagggcggggcccatagaggggcggggtttggtgagcgttgccggcgggcccgcggtacctcccgcactctgacctgcggcccgtaggtccgagccggggacggcggcgtcggtgggtcatgctccggcactccccctcgctgtgggagctggtggaggagcacgttccgctccgggagcgacgcgaagtgaagaggattctgggggaggcggcggtggacctgagcctggagctgcgggcggaggtggggagagggaaggtgggccacgcccctggcctgccccacgactcgggtgatttcccacctctgcgggtccctggccctgccgggtaactcccgagatcctatcctggtctcccctttgactccgccctctccctcactcccccagcccccaccattccggacactcccctccccagtcgcaaggtatcccagctctccttgcaggtggcgatgttacgggcactgctccaagaggctcgatcctctcaagcccccagctcccgccccatctctgacccctcttctcttctggcaccaccgcctctcctaaaggacctcttgcgccaggagctccggcagttgctccagggtctccgccacaaagccatctgtgagggcaggtgggagcctcaggcctgggccctttccctagataccaggtgggctagcgctgcccctaacaaggagccagggttgccttttctgtggtttccagaaaggagcctctcagcttccttcctgtgcaccttctgcagggaccaggcccaagcttgggtccagtatagccccagggtcctgcactttgccttggaggagcccaggtgtgatttgccagaacaggagatattccagatgagaggtggtgggcccaggtaaggtgatggtaggagagagggatctgtccctgcttggcagagggccctagcccactggtgggttgcacctggctccatgcaggagattccagtcacgggctgggcacttccaccgccacttgtgatagagattatcagcccatgagggctactgaaacccagaggaaacacctgcctagcctggggacaggcaaagcttcctggagaaagtggtttgatctgcgtgttgtagtatgaggagcagttttcagggagatgaaagagaagagctttgtaggaagagggaagaaaggaagccatgtccagcaggcggttgttcctctggcctagagaacaggagtgagggctgggctagggaggcagggagagctgaagaggatggtcacaaatggtatttacagctgggactgaatgagataaaatattcataagtggatggcagcaacttcttattctaatcctcacacagcctgaggaggtgggcaaaatctccattttgcacaagaggaaattaaaggccgggcatagtggctcatgcctgtaatcccagcactttgggaggctgaggcgggaggatggcttgaggccaggagtttgagatcagcctgggcaatacagggagaccccatctttacaaaaagtgaaaaaaaaaatagtcaggtgaggtggcgcatgcctgtattcccagctacttgggaggctgaggtgggataattgcttgagctcaggaattcggggctgcagtgagctatgattgcacctgtgcactccaacctgggtgacaaagaccctgtctctaagaaaaaaaaaaaagaagcctgggcaacatagtgagaccccatctgtgcaaaaaaattgaacaggcgtggtggcacgcacctgtagtcccagctactcaggaggctgatgtgggaagagcacttgagcccgggatgtcaaggctgcagtgagccaagatggtgctactgcactccagcctgggcaacagagcacaatcttgtctcaaaaaaaaaaaaaaaaaaggaaaagaaactaaagctcagaagcgataagtgatttgcctgaagtcacacacaatgaagggtggcagagctcatttgcaaacctaggctcccaaactcttactctttgcactatattatattgcctttgtgagaaaagaaacagttgcctagaagtgatatttgggtcctgaaggcctggggtgagcaacatgcggagagtgatagtgacttcattgccagcagcggtcacagagatctcagcatcatcaaggaccaactgaacgtgtccaacattgaccaggtggccagacacctgaggtgaggcccaggggcacctgcatgtgtataggcaggggtggagacaaggatggatcttgaggtgctgggattgtgagacaggaggtgggtagtatacttggcggggaggcccatgtgcgtaaggctgagaggtggaaagagctggctgctatagagctagtgaggttgctttcaggaagcagccaagtacagatgccacggccgagcatgatggtgcatgcctataatcccagcaatttgggaggccgaggcaagagggtcatttgggcccaggaattcgaaaccagcttggccaacatgggaaaaccccatctctaccaaaacaaatacaaaaattagctgggcgtggtggtgcacgcctgtaccagttacttgggaggctgaggtgagaagggattgattgagccctggaaggtaaggctacagtgagtcatgatgggtggcagagcaagaccctgtttctttctttctttctttcttttttttttttttttgagatggagtcttgttctggcgcccaggctggagtgcagtggcgtgatcttggctcactgcaagctccacctcccgggttcacaccattctcctgcctaagcctcccgagtagctgggactacagatgcccaccaccatgcccagctaatttttttgtatttttagtagaggcggggtttcactgtgttagccaggatggtctcgatctcttgatctcatgatccgcccatctcagcctcccaaagtgctgggattacaggcatgagccacctcgcctggccgaccctgtttcaaaaataaataccttgacacaggggtagcctgtgtcagaggattttaagcagcggaagggctgtgatgtgggggaagatggaggcaagaagaatcacagtgcagaagtgtgggagagagaaggatgcctgccagggtgaggcaggcgaggggaagatacttcctgcccagaaagagcctcacaggggccagacgtctatgctgggtcagcccccaagcagcagagggcagtgtgggctgaggaaggacaggttgggtggggctcctgctgaggctggaggttggggccatgtggtggactcagctgagccctggtcctgtgtctcgggttctggctgctgctccctcatgtcccaggggccttctggaggaggagtgtcacaccttggagagggagatcctcatcctgcaggtgagccgcagccctgggccctcccccgagcctcactgctgagcgtagactctcacctgggtgagacccatgtacctgtgtgcatacataggtgcatgtacaggctatgtgagtcctgcatccatttctcaggggtgcatgcttgtgtgcacctgcaaaatcctggaggcccaggattctagttgagcccttaaggccagggccaaccgttttaggtcttttgcctccttcctttacctaagtctgggtacaggccccaccactatcttgccaaactcagctcttccgcaaggctggtattccctggggaacgtggctgccctcacggtggatgggctgaaggggctgcacgggcctgccctggggatcttggcctctgtatcctgccttgccccacccctgccttgagtctgggcactgacgcagctctccctgcagcgctgcctggaagaggagtatttgaggccttgccacccctctgaggcagccctggagcccaccctggcaggtgaggacacggagcagggcccagaacacccagcctcctgctcccaccccacacttgtacacaccctagaagagctgggcactgtctcagcccaatctctccttcagagctaaaggaacagaagaaggccatggagcaggagctgcaggcatctgtggggccttcttgtgtctctcccaaccacaggtaaaccacaacagtagacacagggcagggtggactgaaggatcagaccaccacccctcacagttactctttcttgtccaggcagcggcccttggggtcctccacacagggcctcagacccccgcttcccctctgcggggttgcacctctccagtgctgcctgcctgcacctcctctggagccctaccttcgacctcgaggccagtcggctacccaccgctggggacggcagcttcagtgcagccccagggaagggccagcttccacacccatgtccagtgcagcaccccaagccccagcctgaagggctggtcaccgagtaggctctggcttctgccacagcgcacctgtctgccgctgccgcctcagctgctttggcccagccagcttcagatctggtcttggcgagctctcgccaggaccccaaggctgttggtctgtctggcccttgccccacccccttgccagatccctggtgtctggagctgagtggccgggcatcggtcccaagcatcaaagcctttggcctttctcctcccaggcctccacaaaggcctggcagacagaggtctcattccagcctgactcttgtcccctgggggacccagacaaagcacagcagccgctcagagacaggaatagaaatttcattaaaatctatggactttaaaatcctagtggtgcacaatgggcagggatgggcggcgcaccgttattgctacagaggattagaggtggcttggccggggctgtcactgcacagaggacggacaaatgaacacttcagggattcagacacttcagaaggggctcccactccagagaggggaggggcatgtgggctggggccatttggcacatgaacgagggcagcacatttgggaagactgggcctttagcctcatggagggagggcaagggggtgtcgtgcagggtccccttccccagggtgctgggctcaaacctcctgtggagcagcccccaccccatcccccagaaacaaatgctttgggcaggctgctgggtcacgggcccctgctggctgggcctgacagccaggcctggaatgaggggcagagaccccggagcagcccagtgaggtgcaagcaggcctggaagacagactgaacccgaggctgggggcgaggaggtggcgaccacagagaatacaatgtttacaaaaataattacacagataaacagggctgggcagcacagcctgacaagtaacactgggcagtcccccagcccttcatcctgcccctagggaggaatagccaaatgtgcctggcagaggctggggtcggctctgagggcaggagcactagtcatggggctggaggcccacccagaacctcagctcagggcagggtataagggtatcggaggccacgtaaagccatccaggctgctggggacctggcccgagacccctccaaagtgctttggacctcccagcaaccctccactcccacccctccccccagctgctatcttggcatccaaaggacatgtaaacactggggacatgagcatgaatgactgcactagcagtggtgaccaaggtgacagcagccgtcctggccagggcgtggcagggggcaggcagagacacctggcctctgcctcaccagtctctgcggtgggagcacggggtgggggtggggccactcccctggcagctgtgctcatatccgggagtcctggaggcggctggagccattactgcccacaatggggatctgcgccttgtccgggtgcagtggctggacctcgaagccgtcctcaggagagggggctatggtgggggcgtagcgccctgtccggtgctccaggagggcagggccccagtctctgcttggctttgtggcatttttcaaacgctgcatgaggtaggcatggggcacaggggcagggcacgtcaggagggagcccttaagccccttccagctggcccctcccattttgcctggctacccagcctgtccctgccctcacctggaggagggtgtccccgtctgtgcggcagagccggaacatggcgtagagggggatgcagaggacggaggacagagccatgaggaagccaatggccacggcccagcctgggtactggtagtggttgtaggtgatcggctggtactggatcacagtgaaaactagaataaactgcacggggcaggtgtgggagtgggcgtgaggccgacccagagcccagaccccaggccatccctctaccagcaccctttcctctctggtttcccaaactagaaaagggcatttggggcagaacagggacagctgtcaacatctgggccgtggaagaagcaggcagggccgggggccggagcgcggtgagtgggaaggctctgcggaagggagaagtctgtctttgccacagtcctgaactggccaagcacagtagagctgctgccgcctttggaatcagtcagttctgctcgctatggctccccatggctaactgaagtaaggccacatcctgggcctttaggctgtcacctggcagtgtgacctcaaattgtcttgccggccacactactccgccctcagtgtttcagtcacacccagtgtttcccacccactcttcatttattctggggaatcatcctctgcatcttcctctgtcaaaccctatgtcagtgccctctccttcaaaaagccatcccagatttcctccatttccttctgcagggcctccccacggcgttttccacctgcttcccttagagtgacttggtttaacgttcccatagacctgagagctcctggaattgcatcaactctgggggtgcagtgcccagtacagtgcctgccacagtctcttgtgttgatttgaactgatttgtgcagagaggcagaggaggatggaaagagggtagggcaaagccctgcctgtctatggccgtggagacagggacattcagcctggggaagctccatgggctagaaatggtgagtgtcaggctgcggtgctctagggaacctccttggaaagagatgagtgagattggaaataaaacttgtggctgcagtaacaaaaggagtgaaaggaggcagaaacacaggcagtggctggcgggccacccagagggcctggcgggggaagggggggggcagtcccagcaccctcctcctgagcctccagccacatcctggagcacagggccatattctagaatgcaagacccacatccaaattgggggaccctccggagacactgcacacgatgggagcttataacaggtttcctgaatggaacagatcctgacctacgtgtggacaaatccctcatttgagctgacagaagggtggagtttgtcaaaaagagcttttcagaaatatgaaaaaggaaagcccccagagaaaacacaacagcccagaaagccaggctggagttaccccaaggagaggactctaggctcccctaaaggtaactccagcctggcttcctgggcacaggaagagccccgcccgctgtgcctcaatcttgtggagacaccagatcccagccaaggttgcccctacagatccttcttgtgcttgtctccttcctccccactgcccttggcaggtgccccctggtctctccccaggacatcaatctagtctgaatgctgggagaccctctgagccgcagaggctgagctccccttgggccatagccccagaaggcatggcactctggggtggtggtgcctgccctcccctgcctcccaccactgagacttccgttcctcctgtttcaaagctgggccagtggccagagcggggagcctgtgccaggctcgggaacatcccacaacctaccgggtagaggcctcagccctccacgggcctttattcagaaacatgagccacaggggaagtctggtgctgagccccctgtgccaccgaggcattaaacatgacaagagtgtggctctgaacactggccgggccactgggccagccctctgactatcactcagaggtggccttgcctgtcctctgtggagtgaccattacactgtcaatacctgccttccccgaatcccaccccaaacaggaaggagccaagtcatacggttttggcccctggaccattcctccctcctgcagaggtgtttctagtgtggcgctggcccaggcttggaattggacaacctgatttgaattgtggctctgcctcttattagctgtgtgaccatgggccaattacttaacatccccatgcctcagtttcctcatctgtaaagtggggacaacaatgacaccttggagagctctatcacgggttacatgggaatggtgtgtggaaagtgcctgcttccttgccatggtggattccttccaccaattcagctccctgatgggaatttctcagctgttgaatattcataaaacctggaactccccttcccaagccacccacctcactgcctggaaggcttgcaaagttgcccccatgcagagctgacctctgactccacagtctggtctaccagccttgggctgctgctggaacactggttcccaccacatagccaaggccctggaacaccctccctggagggatgggagataaggccagcaggcagaggctgacacgctatcgatattgactcctgagtccccgggggtgccaggcaggaatgcctgagcaacgtctgcagtcaaataaaggctgtggcactcccctcctaacctgaggccagggcccaggcagctctgagtcgccacacgcctctctgactctctccaacctccctcagcctcccaaaggccagagtcatgggtatggagctccggccaggtgcgggagctcccactgtccctccgctgggtcccaagagatggacacatggccaaggggcagcgggggaagggaggggccggccagggaactcacgaagatgatggcgggagagacgaagcgccagcagatctgaaagaagaggggtggtgggaatcccagcatcatctggatgtcctggaagtagttccggtgccctggagagatggggggtcagcagacccgcaggacagagtgggcgggccaagggccgggtcgcgggaggccggaggctcgagtgctcaccgtagatgtacatgatggccacacacatgatgcaggagatgaccaccaaggagaagctggccgcatagttgtccatcagcagcagccaatagatgcctgcctggggaacagcgggcagctgtgggaggcgcctgcagcccgggctccccaacccttccctgcacgtcctggcaactctgggccagcccttcccttacgcagctcttacctggctggtgagggggatgcccagcaggaagccagccacagccacgcccaaggtcacataggtctttttctgcaggatccactcattccccacctcatccacaatggctgtgaccagcgtctccaggaggcagaactgcaggatgtggctgtcagatcggagacctgccccttgttcctgtcccctcccttccccaagcctccggtccacgtcctgcacctcgtacctgagtgcccagccccagcaggataagcatgaagaagaagagcagagaccacagcggggagatgggaagtagtgtgagggcctcggggtaagccacgaaggccaggccagggccgtggtctgccacacgggacacatccacgcccaggtgattggccatgaagccgaggatggagaagatgacgaagccagcatagacgctggtggcacagttggtgatgctgatgatgacactgtccctgatggggaggaaaacagagttcagcttccctctccccaatttgggccaagaggagacatggagacacggaaagttctaggtacaaaggcacccccaactctttttttttggagtgggagacagggtctcactctgttgtccaggatggagtgcaatggcgctatcacagctaactgtagccttgacctcttggtctcaagcaatcctcccacctcagcctcctaagtagctgggactacaggtgtgtgccaccacacccagctaattttcttttttatgttttataaagaaagatggggtctcactatgctgcccaggcttgtcttgaattcctgggctcaagtgatcctcccgccttggcctctcaaagtgctgggattacggcgtgaagcactgagcctggcccccaactccttttctggtctgttctgggcatttttaaggagcctgagctgcctgagtcctcacagacccctgggacatcactgtccctatctctcttctctctcctgcctaaacctctctcctcattctccaacaactttatccagaaccagtattcccagaacctcaagatcatgaggggaaaggaggcctcgtgggcccatggctgcactggagctgagatcaggctgcagagagtgcaggaagggggcagcctcagcccagcagggagcactcaccggtaacagttattgtggaacttgttgtaggaagccatggtgatgaggcctccccacgcgcagcccagtgagtagaagatctgggaggcagcatcaccccacacctgcagggaaggaccggtgggtgaggagctgtgggcagaggcaggcacctccctggcccctccccagcccccttccggtttccctcacttcccaccttggcctccaggatcttgtcccactgcggggttaggtagtacatgatgccgtcaaaggctccctccagggtcactccgcggacaaacagaatggtcagcaccacgtaggggaacgtggccgtgaagtacaccacctggcacaagagggctccatggactcttctgggctctcccctcccctgggcaccaccaccctggctccctaatcaccaccagccccctggtccctctccggctccggagtcccttcagcatcccctccctgcaatacacacataacccaggtagggggcagggtctttctgggtgggcacagaccctgctggggaggggtacttgctttccctgaagacttgacccctcggatgaggcagaggaagacgaccaaccaggagacaccgaggcagccaaggaggggcagccgcacctccccaaagttcccaatgtcatctgacagcttcagcacgtacagcctgggaaggggagactctgtcactgagggccagccgccgctgcccagcaacaaattcccaaggcccagggcccacccgggctgtaccctcctttgtcatgaggtcccagcagccaccttgtgtgacatgggagctacttcaggggcccagccctggccggcccagtcccctccacctgctgcagcccctggggagcccaacacagtccactgctctgcagcctttcccaggcccttcaagggctcctggaggccacaccccaggcttgggtggtcttcctagttcctgggcgaggagatctccttgtccccagttgggctcagcccaggtccttgtttgcacacttctcccttcaggaatgccttttcctcattctgtcaggtgtcacctcctccaggaagccaccagtgagcatttcacgtgcaccaattagctctatctctgataaattgagggaagcagtggaatgctcagtaaagattggaccctggctgggtgtggtggctcacacctgtaatcccagcactttgggaggccgtggtgggtggatcacctgaagtcaggagttcaagaccagcctggccaatatggtgaaaccccgtctctacaaaaattagccggccatgatggcgggtgcctgtaatcccagctactcgggaggctgaggcaggagaactgcttgaacccaggaggtggaggttgcagggagtggagattgtgccactgcactctagcctgggcaacaaagcaaaagtccaatctcaaaaaaaaaaaaaaaaaaaaaaaagattggacccaaatttctcccctctgggtggctccatctggcaccctatgtcataccagctgtgatcttttgatcaatcagacatttacgtgcccgggcctgtgctaagtgctgggcatacaggcctgcaggggcatctccccagccctcagggaagagggcaaagaacaactgctctacctccagcaccagcattcaaagtaaagaaaccatttcttgtttgaaggattttttttttttttgacacagtcttgctctgtcacccaggctggagtgcattcgtgcgatctgggctcactgcaacctccgtctcccaggttcaagcgattctcctgcctcagcctcccgagtagctgggattacaggtatgcaccaatacgctgggctaatttttgtatttttaggagagatggggatttcaccatgttggccaggctggtctcaaactcctgacctcaggtgacccacctgcctcagcctcccaaagtgctgggattacaggcgtgagccaccacgcctggcctgaaggattttttaatactttgtctaaccatatatgctaaacaggtagtgttttatattattattattgagacagggtcttgctctatagcccaggctggagtgcaatggcacaatcatggctcactgcagcctcgacctcccagtctcaatcgatcctcccacctcagcctcccgagtagatgggactacatgtgtgcaccaccatgcccaactaatttttgtattttttgtagagatatggtatcgccatattgcccaggctggtctcgaatgcctgggctcaagcaatcctcctgcctcagcctcccaaagtgctgggattacaggcatgagccaccgcacctggcctatattatttttgactgcaagaatatagcgttacagtgttagggactgaagagtttaaaaggctagcctggaaaccaaatgatgaattctagctttatttttagggcatcatattctgttttttgtttggttttggttttggaccacatgcttttgagatcaaacagcctaaggacatttggaacccaacgtatttacaagtgacctcttgacacatgacatctccagaattactctgcgttgctttaaaaatgtctccacatgacaaatcttatttccccggccaggtggtgagtgccttgagaacaggaccctcaggaacaggtcccacaggggctgtggttgtgctgcctgagctcctatcagcagtcttagtgatttaggctgcattatctcattttgtctttaaaaccaggtaggtatcacgactgcccaatttcatggacaaatgactgtgaacgacctcccaaggccacagctaatatgcgacagagccaggatttgggaggagtctgtgtgactccagagctgccatgaagaccctgggggacaggagctgggccccacagggaccgcagaggtgagaaggcctggtcacgagtttaggacccagtagcaggtatcagaccagcacaggggactggaaggcaagattgtgaagagggtggcgagggaggggaggaccctgagtgagaagggtgagtgggtgagaggcagacatgggctcagaaatctgccgtttgagcttctctcgctttagagtctcttcatcttacttttgattagcttccctcatttgtaaaatggtgatttttaaaatccctacacaagctacctaacagggtttttgtggcactccagtgagatcgcgcagctgtccaaagggtcattggagagtgtggactaaacacctgcacagccacccccacctaattcaccccggcacacccagcaacagcagcaccagacgggcgcaacacacacagattctgatacagcgactgctgcctagctccttaacctctaaacggcagtttctgagtctgaaaatatggatactaatatctacttagataacatgcctggcacctagtaggtgctcaacaataagggtgcttcctttcctcccttgctgaagccagcctgggttgctctcttcagggccatttccctggatctccaggagagggcagcagggagccgtgctgccgggaaggtatcccgcatgggacagtggccagttaggcaggcctggctccagcccgcgctggggagtagagtgcagcggctccaccagccagatttctttgaaggctcttcccctctgattttactggataaaatctctagagctttgccctgggtgggcccagggctgggaatctctggcagtcagtccctgggacaaccaccactggagcatctgggggtggggttgcacaaggctttgtgtttctgggagcttccagaaaggttcatcaccccagactagatcaagttgaccagtccacatcatgcctcaaatgtaataaaacgcctcactcagcaatatctgctcgttctcccatcggacggcagctccgtgaggacaatgtctgcctccctgccctctctcccctctgagaacagtacctggtacctagtaggtgctcaagaaatcagctgggtgtggtggctcatgcctgtaaccccagcactttgggaggccgaggtgggtggatcacctgaggtcaggagttcgagaccagcccggccaacatgttgaaaccctgtctctactaaaaatacaaaaacaagccaggcgtggtggcgggtgcttgtaatcccagctactagggaggctgaggcaggagaatcgcttaccccgggaggcagaggttgcagtgagctgagatcgtgccactgcactccagcctgggcaacagagcgagattctgtctcaaaaaaaaaaaaaaaaaaaaaaaagaaatcatctgtccattcagttccaggtgtattttttaaaaagaaaataaatgttaggatgttaaaaattaaaaaatgaaagacaaatgaaatgacctgtctggtaactgagtgcctgagtctgcccatgcccctctgggggacagcaactgtgttctctatgctctgggtccttgagaatagtggccctgtcttacctgtctttgagtgtctacagcccagcccagaggttggcacagggaagctgagtccttcagggtcagagtacttggacctgggtttagaggccctgtggtgacttgcggtatcctcagacccttgtacatttcagccatggctttccatcacatgtggagaaaagcctcaaacccttagcctggcatgggaggccctgtgttatatgatgcctgctggcctcttctgtcttgtcactcagcgtcccacctgctcccaaccccagctccagtttgcctccttctggcctctgctcacctgctcatgtggttcccaatctctctactttcctctctcccttctctgggaagctctgactgcctggtcttgccccatccccttagcaccaagcactacctctttgtgtctctgtgacacccctgcacatacctggaccgaggcacttgccctactgtgattagcaatctgtctccccactgccctgtgagctcctcaggacaggggctctgggctgttcatacctaccatggggacacagggcctggcagagcagaggcgtgaatgttgtggaataaatggtggaggcctgccagcatgcccccaaagccctctgcccaggggttccccagcaagacacagggaatttccaactggtgggtggagggcacagcaggatggcctgagactctggtctctgtcgcctctgaacaaaatgtgccaggatgtcttgatcacggcacccccggctcagagaccttccatggcgtcttttgttctgcatcatcaagtctaagcctaatcctggcaagttctttatgaaggcagtgccacttcctaggccacctgaagcccatgcattctccccacacctgttactctcatcagagtaggctcccttcagctttggggccagcctctgctcatctgggacagagcctttgcccacactcttcttctccccaggatctgcccccctttcccctgagtctcctctgaaggctggtttgctggatttctgacggccttcctcacggctactctgtaaagatcctgcaactcaacattccatcttccattgctttctttcttttttttttttttttgagatggagtcttgctctgtcgcccaggctgaagtgcagtggcgcgatctcagctcattgcaagctctgcctcccgggttcacgccattctcctgtgcctgccaccacgcccggctaattcttttctctttttgtatttttagtagagacagggtttcaccgtgttagccaggatggtctcgatctcctgacctcgtgatctgcccgcctcggcctcccaaagtgctgggattacaggcatgagccaccgtgcccggcctccatcttccattgctttctgtacatcaggctcttctcctaaactcttcactcacctctaccctctcccagcccagcagcgggctgaacctgcagcaggcaccctactttgtcttcagatggttgcccagtggggacagggttgccaccaggttccccccaccccaggtcctgcaggtgcctcacctccagtactcctcgctggggctggtcctctggaggctgtggttgagcaggtgggagaggttgctgggcaaggcggctggccgagagccattggtgaggttggaggcgtccagtacaccggcgcagtcatgcgtgttccaggggttattgcagtaggcccagggcagcacgtgcgtcatggacgagaagaagtagtagaaggcgatgcagatgaccacattgtagtagatgccgatgtaggtggacaccaccatcataccatagcccactcctgcaggaggggaggggtggggggaggagcctcagcatccagcaggaggaggtgaggttaataatttcttttttttcttttcttttctttttttttttttgagatggagtctagctctgttgcccaggctctgacacccaggctggagtgcagtggcggaatcttggctcactgcaagctccacctcctgggttcatgccattctcctgcctcaacctaccgagtagctgggactacaggcgcccaccaccacgcctggctaatttttttgtatttttagtagagacggggtttcactgtgttagccaggatggtcttgatctcctgacctcgtgatccgcctgcctcggcctcccgaagtgctgggattacaggcgtgagccaccgcgcccggcctttttttttttttttttttttttgagacggagtttttgcttttcttgcccaggctggagtgcaatggcgcgatctcggctcactgcaacctccgcctcccaggttcaagcgattctcctgcctcagcctcccgagtagctgggattagaggcatgcgccaccatatctggataattttgtatttttagtagagatggggtttccttttttttttttttgacatggagtctccctctgtcgcccaggctggagtgctgtggcatgatcttggctcactacaagctctgcctcccgggttcacgccattctcccgcctcagcccccagagtagctaggactgcaggcacctgccaccacaccaagctaattttgtttttgtatttttagtagagacagggtttcaccgtattagccagtatggtcttgatctcctgaccttgtgatccgcctgccttggcctcccaaagtgctgggattacaggggtaagccaccgcgcccggccaagatggggtttctccatgttggtcaggctggtctcaaactcctgacctcaggtgatctgcctgccttggcctcccaaagtgctgggattacaggcgtgagccactgtgcctggcccgaggttaataatttctaagggcccaaggggcaggctgagatggagggccaaaggaaggccaggtcaaggtcttggtaggggtaagttggcggggggtggcgcaaaggagttttgtgtgtacacgtggtaggaggggagggtggcagccaagtaaacatgggtcccagcatgcatccatggcttaggccgttgatgtggggcttggggtcagcatcagggctctacagaggtcagccatgtttgtacagatgggcgagttggcacggccctcagaggccgttgtgtgtttgtgtatgtgtgagcgagtgccccgcccaggcctcacctttgaacatggggctgatcctccagacccccaggcacccctggcttgcaaactggccgaaggagagctccatgaagaagagggggatcccgcagaagatgagcatgatgaagtaggggaacatgaaggcgcctggtaggcagggagaggtctggctcaggagtgggcttggagggatctcaccctgggcttcctgctcagaactcaacagcaaaaccttcgcgattgggtaggacccagggaggagtgtgccaggcttgagcaggagcctgggctgaggcacaccacccccagcctgtctttcaacttgacagaggctctcaggaattctgcttggagtggaatccaggtcccagagcctccatacttgggtgggatttgatggtttaaacaagcgatttcacaagcataagttgctgagatcctcaacatccctgaaccatttaggggggctgctgaaccccagggaatagaacagggagccttgtgggcgggggggggggggggttaggtccttttctcacctctcctcacctcaaagggggccaactggcagggccagcccccaacaacagactgccagggtctggggtggcctgccttaggcaaagggtgcctaagccagggatgggggcgaaggaggccagggccagaggccagcctttatctggagtgggtctgtgccagggagagggtggcccaggccctggtgggtgggctctacccaagtgggtggtccctgccctgtgcccactgggtacctcccccgttgcgatagcagaggtatgggaagcgccagacattgcccaggcccacggcatagcccacgctcgtcagtacaaactcgatctggttgccccagttgccccgtttgaggttctggtccctcttggtggcctcgctgggcacagcaccattctgtggggacaggagagaagctaccatcagcaaggcatttgtgctccatgcctgaccctctgggcctcccccagcagggaaaccgtggcccctccaacacccctccccgggcttcccctctgctggcaggagcttcaggcaggcctggcaaaggagggaagcagagagtagtggctgccagagggcgccaagcagagcttccctcaccagccccacagcacccagtgccaggtgcacagcccacctgaggagctgctaccagcatccgggaggcgggacactgaagagggagctagggccaggagcccccaagcccctccaaaacctccccttgcccctctgggtaaggatctgggagcagctgagcctcataccaagcagccaagtcaggctgggcacaaaggggcctgtgtccagacagcccccccacccgtcgcctaccacatcaccaggctgagcacgctgcccctgggcaggcgactgcgggggaggggaggttagacccctcccccagctgaaggcttcttcctgggggcacagagtgggcagggctggggggaaatgggggagcagctgagccgggacagacatggggagggcattctgggactctaggtgggagggtccggggagctagctacactgcccatggctggggaggggccctggggagctgacctgggccatggctagggagtgctgggccatgagttggggaaggagaccagagttgtaggccccatgccagactttgaggacagactctgctagggaagtagagggagtggctccagaaaagggtggcaggaagaaggatctctgaacagggagaagcgtcacctgcaggggagggggccgaaggtcaggagaggcagatgcggggatttgccccagggaagaatgtggggcctgcaggactgagctggtggcctgggccccactgaggacagccccttgtggaaccccaggcccaaaagctggaactggctctgcaagtcccttggttaaagaagtcccttaataagtgccatgctccttccacctccctcccacagtgagcaggaaattaatcagagcccaagggccccaaggggtctcactaaggagacaggggctcagtgtcaccaacagaaacacagacagaccttagtgccagagacagcctcccagaggtgagctattcccctgagagaaacagacagacctggcatcagagatggagccccgtagcctcagagagatgccagtgatgtgacattcaccctccgcttgaaagagacatattcgacagcagtcactctggtcaataagcaaggcagcctggtgcaggtgaaatgctatcagaccctgatgctgatgaacaaacacagacggaatgaatggcctccctgggccccaagcgccttggataggccaggtgggaatgtgggcaaaggaggcaccaaggcctgatgggtgggcactgcagcacagacacctttgtggggcagccaccctgtgctctcaatccagcatcgaccctgccgagatgtgatcctcacaccctccacagagggcaggggtgcagtgccagggaccatgggtttccttcaaggagcacccagagcaaatcagtggctgaacaagccttctttcattcattcattgattcattcatgcaatggcagatttattgacactggctatgtgccaggcactgtgccaggaagtgggacttcagcagagagctcctacccattcggagctggaaatctagtgggggtgcaatgaaatgtatacacccatcatctttagatgtggcttcagggtgaccacagaggggatcatctcaaaatcacaagagtatggaaggaggacaaggcaggaaagcagggctgaggtcaaggaaggtctccctgatgaagaggcttgaagacatgcttggccctggtagagggtgccccccggcctgagtgtgccctctgtgacatgcccctacagaatcctgtctgagcatgtcaccacctcctggggccttcactggggcaggtgtggcaagatcacagagtcaagggcccattttttggagggtgtgaggcctgctgggggtggtctatctggtcccaaacaaatgccagccaaatagggctcctatatgttgaccctacaataccagttttattctgtcccagggttgtttacttaggggcacaatgcctgattgtgccagcagcacagtacacggatggggtcacagagcagcagttacagctgtaaaagggacaactgatggtccaggatggacccatgggcagggtaagggcaaggccctttgcagagatccaggttcccaaggcttgaagatcaaggcctgtctcctgttcccagcaggatgagggacagatgccccataccccctgaccaagtgggaccacatttggatccctgaagtctgctccttccctggcagggggaggtacggggaaggtggtgatgcttccagccacgtgccacagacagccgcctgcctgagccctcaagagccagccactgctccgttaatgagccgtgtgctaaccagcttagccgtgcgggctgtaacccagggaggccacagcccccgcgacagggctgaaccggggttggcgacggggctctggcaggaagtttctgacaacactaaaggtctgctgtatgcagaggatccttgcagaagcagcacccacttctgcttgggcctgggtcccagcactgtggcgctcgaccacgggaatctggcccaggcttggcctctgtcttcaactccagggctgtctacgctcaggtggcttggctggggagggctgagctctcagcggacgacagagcaggcctacctttctccaagcaaactggaggaaagactctccaaaaaaaaatccaggcactttctgggtgttctagttcccttccttgtccagatctcctctggggaccaccctctgacttccctcctgagcagctaaatctttttcaatactgtatggctttttttctccctccttgcataatctttcctattctaagcctctagtttttcttgatctgctgggtggacggctgtgtcactgatatgaactgtccctgcagtggtcatcagctgaggtacccacggaaaaatccctttgtgctcacgatttgactcagactggctgcccgtctgcctgagccagctcagccccatggatgggctctgctccaggcttctcctaacccccaccaccatcaccaccatctgcccccctctgctcaccctcactcacttgctgacatctcagtggggaattaaaccatagcggcatggttccctctggcttggccccctcttctgcaggctccctaggcagcccctatgtgccctgtcacccttcctggcagctctgagaggccactgccaggacaaagcagcctccacttgccactgccatgggctcagcaggtggtctccaggacaggactaccctgccctgtccccaagctctcccagccatggaaggaatggaggctttccttccatggcggggtggggtgagctggctgacacatatacacccatacacacacacacacacccctcagatgttcccttacccttagaaccagtcattgagacaggagtgtccaccctggcacaaggacttatgatctttcctggtttaacagcctcccaccccttccctgcctagctgggagagccacactgagcaaagtcacttacataagtcctttacacagccctctgcttggcttatttactgctctggctgagcccctggaattaaggctgctcagctccgagggcagaatccagatctcccactcagccctgggcttggcagaggcgggacaccggtgcaggtgagagccctggtgctctagggcccgctcctccagtagagccctgggcaagccacttccactcttggtatctcagcactgctgtctacaaaagcaggggacagactagataacctcactatcagacaagatcgggtgcgttcaggatggtatggccatagactagataacctcactttcaatcgatctgccagattcccaggctagatagcctctgtagctactcatattccatagctctccctcacctggaattttgctatttctgactttcccctgtacattccattagttcccactagctttctagattactaaaaacaattttgcccttttttttcctgattataaaagcataataagctatcacacacaaaaaaattagaaaatacagaaaaaggtaaagaggaaatgcagcaacaaagcctactcccagagcgaaccgggccagccccaggatgcactcctgccttttgctgttgcacagactcagggagcccagctctccaccctggacggtgactgtgctctggtgtgacactcccgcctcctagatcagtggccagtggatatttttgtgaattgtgagcttccccctcctgctctgggtggacactgaggaatcctggagctgccctggatgggcgggcccctctgggacccagcaggctttgtgtttaggactctccagccccagggtttgctcatgggatgaagtcccatccaagacaaactttatggaggagaatgggcaagacctcacatcccagactgactttgagccaaatcagatcactggcaactttctctaagccccaatggggaatctagacagaacagccattacagtaaattgtggctgcctcagaagaccccacgacctccttccggccaggcacccctcagtttttgttctctcctatcagtgcagggcccagcctggcccacaggcagcacctaccctgcaatgacagaatcttctgtccttcacctacatggcactgagtaggggcagagagacccagctgcagctctgatctctggcctcagttacctggatatgggagagtctggggccggggtggaggggcagaacatgggaaaatctcccccgggccgagcagcccccagtggccattcatgcctcctgcctcaaggcaaacctcagagccatctctgggcacctctcaggactccaggtgccttcagagtccaggccttcatatagcagatgagagaggcaagaatacgccttgtgcttatccattgcagagccctgactggcagcaagggacctgccaatattgtgggctgcagacagatgactggcacccccaggcatgccgggctccactccaggccctggggtgagtgatggaggaccctgggtggaccctggccagctcctcgcttcccaccccagacaagcccaggagggaagactggaggcaatggtcatgtcctgtgctgcagcggctgggggcggcgtctaccctcactggctagcagcaggcaggcactctggaaagtggctttggttcttgaccctagcagtactgaggcttgagggcagccctgcgtactgttcctcccagacccatcccacatcgcctcagaggacattccctctcttgccttttgaaggtcaagtcaggatgtcctacaggggagaagtgtagctttcgagtctcctcaccctcgctgccatccgctgacatctccacccgtccccggcgtccagggatgaggacacaccggctcccagcccatgcgggcacttgccctggaccctggaaaatgttctgtggggtctctctcttcccagctgagactcttgccccatccccttcccccaccccttgccactgaaaccatgtaccacgttcccctgccccctcacccactcttcccataggagtaactgccgtggcacagacaatgaggctgtattgattagtacaattcctgggcacctccggcccgtctccccgggagctaggacaatgcagctttgatacacagagcagattctcagcaggtccttgggctgggggagccctcacacccccactctcctccccctcacccccaccacacagctaactcttcctacactcctttgcacagttgcaactttctgggtcactttggctggtgtctgtcttgcttgctggctgtgcctgcccctccctggcacagaccactcagcccctctccccatccgcagcccagcctctcagcctgcctggcaccaaggagggggctcaacttcctggaaggtgactgacctgttctggggaagagggggccacaggtccatgagccgcggccatcctggggcgagcgatcgcagcccgcgtgtctccgccgctcattcacacctctgccagctccagcgcgacactgacgcatcccctgcctctcccactgccgggctgggcagcgtcaattactttcacctcatctcctcccgaagctctgcctacccgctcccctggccctgcccctccggccagtccccatgcagcccagcacgggtgctccggagctggagtggggtgtgtggggtttgttgtgtttttcccttgttcccagcaagtaactggaacaacacacacacacacacacacacacacacacacacacacacagactggggcagagcaggcgagagggtggctcactccccccacggagctgaccagacgctgtctgagcccacaggcctagcactgggtgggctcctgctagggtagttgggtgtctgatgagtgacggggtctgccccattgggccctggatggtgaccggcaggaggatggaaggcacagtccacagggcaccaccagagcagctcaggctccacggaggggtgcgggctgggagaaaccaagccctagggctgtacctgacaccccccaccaaccagagatggggactcccaaactgccagggtgatggggcgtcttcctaggagaatgcaactgaccatgcaagaaagccctggcctagtgaaccacgctgtcagctgtctggacaaagatggcattagccaagggggcaagtcatcccagagtccagacaaagggggactgtggaataagaacccgtgaggatttgcaccgtgatgcccagaagctgaggtgctagtctgggagtgtgcgtggcgtgggctggtaggtccagtggtgtcgtcaccatgactatagtcaccactactgtagtgggatgccactcagacccatccagtccctttctctgaggccacacacactggccagtctcctgctgaccccaagatacctcagaccagtggctcggaaggtgggcatatgcattccggtgccaggaatgtgtcaggccctttggaaactggtcagtcagcagaaggcctggcttaccacaggacctcaggaaatatcagtcagatggacacgtgcatgaattctggtgtaagaacagctttcctgtgagtttggtgagtgtggcaaccccgtagggaacataaggagttttgtcaagcacaggatgacattaaaaatttaaaaacagggccaggtacggtggctcacgcctgtaatcccagcactttgggaggctgaggagggcagatcacaaggtcaggagtttgagaccaacctgaccaacatggtgagaccaaccccatctctactaaaaatacaaaattagctgggcgtggtggcacatgcctgtaatcccagctactcgggaggctgaggcgggagaatcgcttgaacccgggaggtggaggttgcagtgagccgagatcgcgccattgcattccagcctgggcagcaagagcaaaactctctctctaaaataataataataataataataataataataataataataaataaaaataaaaagacaggtggggcacagtggcttaggcctgtaatgccagtgctttgggaagccaaggcaggagggtcgcttgaggtcaggagttcatgaccagcctgggcaacatagtgagaccgtgtctctacaaaaaactggcaaggtgtggtggtgtgtacctatagtcccagctactcaggagactgaggagggagttttgcttgagcccagacgttggaagttgtagtgagctatgatcacaccactgcactccaaactgggtgacaaagtgagaccttgtttcaaaaaattaataaaaaataaattttaaaataagataaaaagtcacagcctttagagtttgacagtcctgggttcaaaccctagctttgtcagtttctcaccatatataaccttaggcaagtccattaacatgtcggatctcagtttctccatctctaaaacggggaaaccacccaccaatcattgaatctagtgagcattagtaataatggtaatagaaaatacatagtaagtgcttgctgtgggccaggcactgtcctggctcagcatacatgggacgcttgcttcacagacagcccatcaccctgtgggcactcacctagtatggtacaagttaacttcccatatcttaactcattgggtcctcccagctgtcccatgaggtaggtccattattatctccatgttggtttggggaagatggggacaggccttggctcaagcaagtgtcctaaggatggcctcagatcctaccgactcagctgctcactgagccagcctcatgcgcctggtccccagacacactcccctgacttcccatgggcgcagactgagggccaaggcgctggctgggccactggctccaggaaggtcccgtcacccatgatgcccaaatgctcacttgcaccgagggtgggctctgggctctggctgccctggcctgggccgggtgcccagaacaggcagccatggctggacggctttccctggctctggccatggggacaggaggcggcagcagcccagctgggccctggccgtaatgaggcctcattagcgagatccagctgctctagccccacttagggatgctgactcccccagctcccgcctctgactttgcctaataagagtgggcatgcttccagaggggcaaggaggctagggtctttgttgtcccctgtgactctggagggaaggtcccgctgagctgggactgagaagtgccggggatgggggagggctgcagggaggctgtgtgggaggccgggctacagggttgagtaggtgggctagacaggaagtggggagggggagggagggcagggcccccgaccagagaggaagctgaggaaggctggaacttttcctctggatctagatattgcccatttcacggaggatggggtagctgctaatctaggatcagcggaaggtcattgcttaggctgtcctggctagaagagcacctccactgtactaggccttatctaaggagaatgcccactgtgtgccaggccctgagccgggatagcacttactggatgtcaaatcttgtgctggaagcacctgctgtgtgtgagaacctgcatcagcagagtgcccaccgtgtgccaaatccgatgctgatcagcagagtgcctcttgtgtgccaagtccgatgctgagacagcactcattgtgtgtcagccccaggtggggagcccctgtggtgtgctaggtcctgtactaggggagtaccccgggtatgtcgaattctgtgccaggtaaggacccaatgtgcgcccagctctgagctgggtgagcacccactgtgtacctggcagtgtgctagatgaatgcctacagggtgacaggctgtcttctaagggagtgtttaatgtgtgccaagtctgcactagttgagcatttgccacacgctaagacttcggttaggtgagtgcccaggcagggacaggccctctaccaagggagtgtccaaggtgtgccaaaccctgtgcttggtgacctcccaataatgcaccaagcctgcactagttgagctcttgctacatgccaacacttgggctgggtgagtccccactatgtgccaggtcctatgacggatgctacagacaggaggtgcccaaaccctcagggaaaaacatatgagaacgcgtcagggtggggcagcccctggcggcctgtggtgcttgcaaggcctccttggatttggacactctggcacccagaaccctaatccaaatgagtctgttcctgttcattgtaaggcttcccagtggcagaaacaatcagtgtgctcagacatgggaagaggtcaacaaagctcaccaaggcctgaactgcccaagactctgcatgagtgggcagtggcactagggaggggactgaggtggccagcctgggaaatggtgtgacattggtgggtggaggattaaaactgagctagtgggggctctcttgcctcctgtcctgggtccctctcctccagccccttgtcctttgagacctaggtggccctgctccgcacgtgtatgaggccctaggtctccacgggaggaccaccccacccaccccctagtgcccccaagcatcccagctgctcccaggcttggaggcaccctggccagctgggttctcgcacagccctgtcctaggagctgctgaggcgtgagggaggcagctgagctggcctggcagagaccatctgggctggagtgagggagggacacgtgcagcaggcatgtgggcctgggcacgtgctggtaagctgcttgttacccatggggcactggctgtagcatccagcagaagctccaaggataacacagggtgtctgccgacactgaagagacttggagggccagtgtcctcacacccaaacctgggtaaagggggatagaagtgaggatcccatggtaggggccagtgcctgctccatgcatgccagggcacaaatagagcagcagaagccacggagaactgggatggtccaagtgcatggctcacacacacgccccttaacatcctctcttctgatctaccagggtatccaaagaagaaccctgtcagaatgaagcttccttagttactagccataggaagacacagaagacacaaatgtgctgactgggctgcctgtgttagaagagacggggctcagcagggaccagctgccctatgcacctcagaggctgtgtctagagacaagcactgaatggaggtggcttcagtcccaaactggaacccaagaatagagtggagtactccaaggtcatcagcagaactgaaaaggaagcaggaatagaatctccaagcaaccactgggggtgcccatgggacagatgctatgggcctcaaacgcagcaacagtgggcaaaagccaaagggcagagagcggggaggagagcgagccccagctatctttaggcacatcctggtgctgggaacaggagtcccaaggcagcattcccatccatagacaggctggccgggccgaccggcagagcacagtccgggaagctcagctcaggcagggactctgggacactgggagccatgccctctgtgctgctcacatctctcctgcctgccctcctcccagtccttccaggtcactccagagaagaaagagcaaccagggaggactcagaggtttcatggggctcagaatctccatggtaggaaggggcagggccacaccccgcttcttatcacaagcccatggcaattccaagacttctccaggaaaggtggggccatgtttgggttctcagatgggattcacccctagcaagtgttcaggtcataagatctccatctgggcccatttctgagcacccagatttcaggaatctcaggaatactttcaggagcttggttcaatcagacttgctccaatcagtcaatcagtagggggctagaccagagctggcctgagggttggggccaggggttggatgctggaggttcagaacagggccagatagaagatcctgagcttggagcagaaccaccggttctctcccacaaactgctgttttttaatttttctttctttctttctttctttcttttttttttttttgagacagagccctgctctattgcccaggctggagtgcagtggcgcttgcctcactgcaacccgggttcaagtgattttcgtgccacagcctcccaagtagctgggattacaggtgcgcaccaccacatctggctaatttttgtatttttagtagagacaaggtttcaccatgttggtcaggctggtctcaaactcctgatctcaagtgatctgccctcctcagcctcccaaagtgctgggattacaggcgtgagccaccctgcccagcccaagttgttcttttaaaccaggtactttgagtcccagaaatctttggtgagagacagggctcgtttggggagggctcagtagagacaccaggccaatgactctttcactaaatgagaaaagcaacacaggggattgaaaggatgggagctgctgagggagggactgtccatgctcagtcccaggtccccacccccggcagccgtccagtctagcctgtccccagggaagatctcaagagaaggaagacaaccattgcctctgggacaggatttggcatcattttcttggttcttgcttctggtgctgacctggtccatccatcagcgagtcttgctccttcaagaacctcacccaggccgggtgcggtggctcacacctgtaatctcagcactttggaaggccgaggcgtgtggatcacctaaggtcaggagtttgagaccagcctggccaacatggtgaaaccccgtctctactaaaaatacaaaattagctaggcatggtggctcatgcctgtaaccccagctatttgggaggctgaggcatgagaatcgcttgaacccggcaggggcagaggttgcagtgagctgagatcacgccactgcactctagcctgggcaacagagtgagacttagtctcaaaaaaattaaaaaaaataaaaagaatctcatccacccctctgtgtctcgtggcctcaccactacctctcccgtgtctcgtggcctcaccactacctctcctgtgctctaaggctgagggcaaagaagagccaggacttggggaaagggtggagggacattttctgggaggcctcaggagaggattcaaaacaaaatgttctttgttacttttcagactgagaaggacccaaagaagtggagaaaaaccaggcagggtctgagggaggaccccttgatcagcacagactgaaggcgcctgcacagccccgcgtccactgtcctctcagcatatgagtggcctccttctgtctggagcacctctgtgacaaggatggggcccacacctcctgccttctggcaggtctttgcgggctctgcgggcttggagcctgatgctctctgacctgctagatgaggggctacctgcccaggccggggtcagctgggcactcaggagccctggcagtgccggccttcctaagccttccaagcagctggcaggaggtcctgggggcagggcttgggactcccgttccttcccgcagtctggcctctgtactcaccagcatccctttggcaccttttcctaccatggcggcggtgggttggggctctggtgacggggaccacactcacaggctctgcttccagcgcctttcaggccacagatctcaagagctgtggagagagcagagggtgaggtgaggacttggccgtgtggcccacagggctctccagacaggtagtgccgagccacccaccaccagcctgcccaggccctctgccaggccatgtccatatcctgctcctttctggaagaccctcagatccagctccttcccagtccccccaacctttcccctggatctcttgatctccaggcttcctgtcccaatgggcaaaggtctatttttgactttccagatgcccaatcctataaaagataaaaaatgaataccaaactgggatggagtccaattccttcatggtctgtgtgaatggcttcagcctttccccaggaggggaatcagctcagatcagcacactctccccatcctcaccccagccaggcagccaggatggtcctttcctatctgggtggcactcagtgtgggctccagggcagctgggtttgttgtcatgtcattcacttgaaccgagttctgggcctgccacacacccatgtgcagccgcacctccttgcactcccagctgtcccctccacagcagttcaccaggtgaaattctacaaatcttcggcactgcaccgggctaaatgtcacctcttctctgcagccttttctgaccctctctctcaaaagaatgaaaaagttgcttcctcctttctgttttgtgcaaatctctacgagtactcttatttcatatgacacttatttgcttataagttcgtcaactatgagtcagtgagttccccgagggcttgggactgtgtttcttttaccctctgtgcccagcatgtagcacagcactggacttgcaagatgtgtttgttatttgaattgaaatggagggaaatagcgaagtcgggacctctgaaatgaggggtccaggccagcccaggatcttgtgggaagcatgagtggcaaggtggggctggcgagctggggggcagcagccacgtggaaggaacagtctcatggcaatgctggtgcacactggattaatgtcagatgggacggaagaaaggttagtttttgacaggcctcgggagaaatccatcttcagacagccttaaagagttgcctcattgcactccagcctgggcgacagagcaaggttccgtctcaaaaaaaaaaaaaaaaaagttatcttggccagacgtggtggctcacacctgtaatcccagcactttaggaggccaaggcaggtggattacctgagctcaggagtttgagaccatcctggccaacatggtgaaaccctgtctctactaaaattacaaaaattagctgggcatggtggcaggtgcctgtaatcccagctactcgggaggctgaggcagaagaatcgctggaacctgggaggcagaggttgcagtgagccgagattgcgcgactgcactctagcttgggtgacagagcaagactccgtctcaaaaaaaaaaaaaaagaattgactcatgggaggaaaccccaggaaggattcggctctgcctttctggagcctttcttgccttcccagggagtcaactctgttcccaaggctactctgggcaactctgccccacccacagccacctgtcaagggccccttctcacctacaaatgcaggaagtctctggaaggctggaggagagatgaggaggctgctctttgcctatgcaaatcaggccttggcatttttaggccctttgccctggctgcctggtctcctgcagagcttctcttcagggcagggtggggacaagatgtgacccaggctggcctgtggctcaacttgtcctcctaaagaggttcctgctcatggctttggtcttctgggggcaagtaggggaagcgcgggtgtgctcccttaaaagtagatcacaccttgtcctctctcacccctgtgcctccctctccaggtgtaaactctatatttgacttccttaaagccatctgtctgcagtcaaggactaataatgacaatgatgatagtaataacagcagatggcattagaaagagccatgtcagctggaagcagtggctcacggctgtaatcccagcactttgggaggccgaggcgggcggatcacctgaggtcaggagttcaagaccagcctgaccaatatggcgaaatcccgtctctactaaaaatataaaaattaaccaggtatggtggtatgcgcctgtagtcccagctactcgggaggctgagacaggagaatggcttgaatctgggaggcagagattgcagtgagccgagatcacaccactgtactccagcctgggcgacagagcaagacattgtctaaaaaaaaaaaaagagccacaaaaaagccacgtcacaggttggaaattattaagcccgctggtcaggtaagtaaactgaggacactgtgtctcagaacttaggctgcagagggccctcacccaggttatcctggaattcctccaattcctcctattaccatcagagagacagactcggagaggtcacatgccttccttgtaagtgctcgagtgaggacttgaactaggttttcagaccctacatctctgactctgacatttctgactgcaaatgcagtccctgccctcaggtagttcgtggactggagggaaaagactgcttcatggcggcttccaggagaatgagctgggtgtaaagctttgctgcttctcctgcctttgacattcctgttacatggtcccatccgtccattcagaaaacaccaactgattgcccgtggcgtccagtctcttctacgtgtggaagatccacaacaccaggccccacacatgcccctgaagcacttgtgggccactgttgacaagcagtagtgggtcacagaggcagtttagcacatgataaagagctcaggctctgggatctggtaggcctgggctggatttctggctcagctactcaccaggtatgtgatttcgagtaagttacttaacctctttgagccttagttttctcagtctggaagatggggctaacagtagtttcctcgtaagttctgaagtttctgcctaatttttatcctttccacaagccctccacatgttcctcccctccaatctgttaatcttcccaaagccctaaatccctgattctctccaacagttttccacagccaacaggatatggcctaaattgcttagcaggcgtttaaggctggccacagctggactcatttattccacaatattgattgcaggtctgctctggaccagacctgtgctaggcaccaagaactcaaaggtatctgcactcctgcagcttacagactaaggggcaagagttaaaccaatgactaaaatttaaagaattacaaactgagaccaggagtggtggctcacgcctgtaatcctagcactttgggaggccaaggcaggcaaatcacctgaggtcaggagttcgagaccagcctggctaacatggtgaaggcccgtctctactaaaaacacaaaattagctgggcgtggtggtaggcgcctgtaatcccaactacttgggaggctgaggcaggagaatcacttgaatccaggaggcagaggttgcagtgagccgaggtcacgccattgcaccccagcctgggcaaaaagagtgaaactcttatctcaaaaaataaaaaataaagaactgcctactgagataaagggtgtaaaagacaaagattgtgttatgagactctacaataggggggcctggccttgtgtaagactaggggagggcttccctgatgaagtgatgtttaagggtctaaagaagttaattaggcaaagtggcaataatgaggaagagaagaggaagagagagtcaagcaaatggaacaatatgtggaaaggctctgaggctggagctcagacagtcagggggaaatggtcaaagattaaagtggacagagaggcctggccagggcctttggggtctggattttggtcttcatcttgagggcaagggtgcctattgaaagcttttaagcagaagatcaacttcaaggaggagccattggtggaatgtgcatcttgaaaccatccccctagatacagtgtggagaaaggactggagggaggctgaagttgaagagaggaagtcaattagaaatgggccaggccaggctgggcgcggtggctcacacctgtaatcccagcactttgggaggccgaggtgggtggatcacctgaggtcaggagtccgagaccagcctgaccgacatggagaaaccctgtctctactaaaaatacgaaattagctgggcgtggtggcaggcacctgtaatcccagctgctcaggaggctgagtcatgagaattgcttgaacttgggagacagaggttgcagtgagtcaagattgtgccattgcactattgcctgggcaacaagagcaaaactccgtcaaaagaaaaagaaaaagaaaaaagaaagagagagagagaaagaaagaaaggaaggaaggaaagaaggaaggaaggaaggaaggagccaggccaaaaatgaaggggctcaggttaggaaggtgacaatagggtgaggagaggtgcacagatttcagagaaatataaaaggcaacatggcgagacttggtgatgaatcggactgggtagggggagggataagaaggagtctctggtttctgctggtgcagtgggaggaaaccggtgcccgacccagaggacgaatgctggtgaggctgcaggtttggtgcggggacaggagggctggcttggacaagctggtctgagctgcttgtgagccagatgttgagacatcagccacagaaccctggcccaccttgacagtctcaccgctgagtatcagacaggactgtcaggtcaatcagttttaacggtccatcttggccaagccctggagtcctcacgggggatggaaaggtgacaggctcttttcctagcttgaaggaccgcacagtttagtagacagaggaagaagcataatttccattcactgtgttggaggaagtggaggagctgtgggagcaggaaacagcccttagttctacctgggagcccaggtcagcagcctgcggccatctgccgccacgtgagactacccagcacttgcagagggctcctgcttcatgcctttgccccggcacccgttccatgttttttgagcacccttgtctccacttccacctgtatgtatcctacccatcctcaaaacctatcccaatgctattatcttcatgaagccttcctaggtcctccccgttgctgtcagccttcctactgtacccccacgcttgccacacgtagcaattgaggcatgcttccttgtgcccaagtctggctccccactagatggagagttctaccagggcagaggcgtgattcttctgtgtccccagagccgggaactgagcaggtacagccgcagtcgccgcataggccaagtaaagggggcgttttctctgcggtccttggaaacacttgggcatgctcagtgtcgcccattagtccctagaaccagtcccctcacccactactctccaaccttctgatgctccctcactttggcagtctttaacctttcaggtttttctctttccccactcctcgccctgcagcctttatttcccaacggccgcaccctcacgctcctttcagcggagaaatagaccgcgctttgtgcggaagctgtcagcgagcaagcgtcccgtctcctttaagagtgatccgcgagggggtgtggcttgcggagagcaggcccgaaagggggtgcggctcctttaagtatccgccggcccgaggcgcggaggcctccggccggcgggcaggggcgcggtcggtctgggagcagcggcaccgcccgcagcgtcccggttcctcgaagtggggcgcgtccgctttaatcggggagagagatgtgggggcacgggcgttacatcagccgccacgtgtgggcctaagctggcgtggaggcggcggccccgcccccggcccctgcggtggaaaagtaccggggcgccgaggtccccgccccacggccccgcccccgggccggcaccggcccctcccggccctccgggcaagccccactctcccgcccggcccggccccgccgcctgctcgagatctgcagtggctgccgggtgcggagcgccggccgggggtgggctctccagggctgctaggcccctgccctcacctgcggccgcccggccccgccctaggtgtgccggtaatgagggttggggtggggagggcacggattcttcccagggtagcaacccccagagaactcccggctcgctcgcagtcccttcccaaagccgcggccagagcgcggacaaagagaggctgagtgcgccaggactctcccgcgcggcttcccgggtcccgcgggcgcacgggcactggaaccggcaccgggagggcagatagggaggcaggccggctggaggggccagataggcagccaggctggcgggcgctgagaggcgatggagcgagcgggagcccgcacgctgggtgcaggcacggccgactgtcgacccctgcaggcccccagagcgcagaaccactggctcctcggacggacagtgccacgctctggctccggcgctacccgcacagcctgcgcccgccgcccccgatcgaaccggcgtctggcgcccccccgccaccccacgcaggagctccccccacttccctctccctcccgcttcagctccttggtgacagcggtgacacccagacgcgcgcacctaccccgatctttgcggcgagacagacatcccggtgcgtgcacccacactcttacccacagatgcccgcatacatgcgcgatcacacacacacacacacacacacacacacacgcacacgctggtcctggggctcagccccgcggagccgccgaacactcagaccgacggcaggacagacggaggcgcgggccccagcgtcccttcccccagcccccttaccatgctgcagcccccggcccaggcgtgctgggtccgcaccgcggtgcgcccaggtggctttcttaaagggaaagttgcatcagcctcccgaggctctgtgccgcgccgagttcgcccgccccgccgcgccgctcgcagctcttccacagcctgttgtgttttggtttcggggaggcgggggctaagagtttggtgaaagtttgaagagtggagaaggcttgggagatctagccaagtccctcccctacccgaacggctcccctggccgtcctcccctctccatcccatcccctcctcccgtgccgacttctcaggctcctcctcccagggaataaaattacaagtctctccagctttcagatgattgatccccacgaacccctgggagtgagcgccacaaaggagtccccttctccgcccctgcctcgctgccctccagctggggcccttgagcaagcagatgtgggccccttcgggctaggctggaatgaagccagaaggcctggggcactatggggggctgaggctggagttagccctccaggcccctggccttctgcgcctgcgtttcccctagagagaagtcagagcaaattccattccctttggagcagagccgctagagactgtgggcattgctgggtaaggcctaggtcctactccttggaactggagggctcggggtagccctttctcaaatttccctcctggaccaccggcttggtcagctctacttttgaggtggtgttacaggggctgcagacaccaacctgggatccctcctccttccatggtgagacagacctgggttacaatctcagctaaaaaagagtctttgccaaaaggagcatggtgagcctcggtttcctcctctgtgaaacagagagaaggggctaaggaaatgcatgtgtgtgtatataaagcccattgctccaggctgcctctggggagtggtggctggcatttggaatgagcctcccacatttgcataccttgtgagagccaccacctttcatggagagtggccagttagttctgtcagaggaactggtttttgccccaacctgagtagggcatctgctcagggaaggggcccagcccacagaggcaatttctactttggaccctgagtcctcaccattttctggccaggaaacagtttaatttttttccttgggacagtcagcctccaagaagcgagtgcacacatgccaaactcacgtgaaaccaattgttgagtgagattccagtttattaatttatcagaggcactgaacaagataacaggcatcaagcccaggcattccctgaaatgcgagctctctcaggccacacgcggtccattccacaaaccttcctcagagccaaagtacaaagacagctctctgttgtctcctattcacattggactcctgatcagatctgggaagacaccttagtcttatcagcgagattattttcacttttactttgtccccaaacctagtaggtatagcatgtttgggatttttagtctcctacaagccaagtgcaggtgtttcttgcgtgagttgtgtgcacacacacctggatctaggcaacctgttgtgtctgtgcccccagacacctgagccccgattgtgtatttgtgtaggtacatctgtggaagactgattgtgtgcactgcagcaggtctgtgtagttatgt

SEQ ID NO: 559 - DNA, 42471 bp, Homo sapiens
  source 1..42471: mol_type = genomic DNA
tgggctgggggccaggcgggctggcagtcactgaaatgccacctgggagggccgccgaggctgaggctgctcaccatgctggtagcagcacctgcagggctggctcacctgtggctcccagccccaccctcggatatcactcagcaggcccccagggagtccccagatgctggtgcaggtgtgttggggcctgtctcaccggtgacctcacatggccagtgtcgggggtggggcagcctgtgagttctctccttcctgtccctcgacaagcccaccctaacggtcaagtccgcaaaggggtacgcacctgccgcagggccatccaaggtccccagctccaaaaattgctttccaaattccagctcccttagagggcagccagttctcaattgtgagggggtgagctattggattaatttgcctttgaacagcactgagaggcctgggcctcaacttcccagtagtgaagacattactacaatgcgcccgaatccttccagaacccatgggaggtgggtgggcccttcctgcctgggtggtcagagtggggggctcacacagatcctgagccagggctctaggtgaccctggttgctgcaaaggttcccagctgcaccccagaatgccctggtccatcactgggcaaggtctccctaaagaaagggctgcggggaggggggtgcccagcctactagggaaaagccgcccaacccccagtcccaggagacctgcagccaggaggcctctttgctaataccctgtggagctgactgctcactccagtgactttgtatttctggagccctcccagctcctcgcgggactcggtggctccaggataagactcagactatggggcccactcagggcctgtcccccacctcccgttcagctgggactgcgtgagtcctgcagataggagcagccttcactggatccaggacggagccctatggttgccttcccaccccgtgctgggaggtggatgaggggctcatgctctgagccccggactcgcccccttaactgagaggctcgggagtgtcctgggaacacagaatcggtgccgcttcctctcctgctctgatcccaggctggagaaaggcttccttcctgacctcccaggagctggagccccgcatcctctcagcgggtgacccccaaacccctcccaacttcacccctgcagctccctgggactggaaccttccccctcctccccggtggtctccacctgaacatccctgcgcaggctgcctgccccccactcccgaggcagatccgatatcttggctcggcacccccaccctcgaggggtgcgtgctcacatgtgtgcaacccgcccatggctcacccccacccagcggcctaagtgggctgtcggtgaatgaatgaatgaatgtgtgaaggtgggaaggaatgaggtggccaagagggggccaggaacgttcctatacacagaacctggcgcagaagaaaagaacacagaacatcagcggtaggatgattgagtgtttctttaaaaataaaaaccccacaaaaaagccagaacaccctacccaacccagcccagtgtaacaggttagccattaacacagaataaagaaggtcccagccacacacgtcattactcggcagagggtgtccagcctggtcggccgacgtcacagtggatggccctgcgtggctgggacacagacagggagcaggcatggcacctgcgccacgcagagcagcaaggctgagcatgaccactggaaataaataaacatggtgccgacagcatctttaaattagtaagacgttagcacaaaacaaaaaagcacaacgactgaaaatgcacttgcttgttgtggtgggttgtgcttgaaaacacctgaagcccacaagtggaaaccgctggggacgtttgtcagtggagtgtggagaaaaagggacggaaaaatcaagtcttctgagacagtcccctgcggtggccctggtccctgtggaattccagcacagcaggagggggagggggaagcaggcctcagtcagcaccgcgggacacggcccctaccttctgaagtggggtccccaggctggagtggggcacacagcaccaaggatcacagactggaccccccaccaaccttctgcggaggagctcccaccccagctcagacgcccagaagagacctgcgcagtgtgaagacggaccccagcggccccagccatttcactagcagctactttccacaacagacgctggcagcccccatgctcgcccacagccgcagcagccaacaggcaagtgcgtgccgtcgagaggccgccggctccctgtatccttgaggcatgtccacgtcccagagcaggaggttggaacagaacggcatcccgaggacccctagccgaggcgggaaggtaagaggctgacgtcgtgcgtgggccccgccggccccagtgggaagcagtggtgcgtgcctccagggagcacttctcctggacccggggccgtggctgcctacgatgtccactgcctcctggattcacacagcaatgcaccaggcaggtggggcaccagctgctgtccttatttgcagccaagagaacaggcccagagggaagaggtcttgcccaacacagtcagtccacctgcctgctggtggtcctcggcctccagaccgtgggctgtcccttggacgagtggaattcgtccccaggaaggatgcaggtcctatgagcagacgctgtgaagtctgtccatgtgcagcgggaagcaacggggcaggggtgaataaaggtcttcattcctcaagcaagagagacggacatctggtcctgagtccccaaactgttcatcaggtttctccgggcccactggatggtgagggggtcccggtgcccaggcgggggcggcaggctccactgggcacttgctgagagcttgcggcttgagcagccgctggtcagtgaagccgtgtccggcttcgttggctcccggcttgggacactcagggctgtgccacaggccagctcctccagccacagctgagcactggagtgacgctggaccacttggctccacctctggctggggagaagggaagcccggggcctgagaaggcagagccccccgagctcaggagggatcctgcggggtcttcttgttctgggggtccctggctgctgccatggaggcagcgacagctcaggaaagtgggccgcattggccaggcctcggctgcctcccatagcgaaaaaaattcacgggaacaacagaaacaaggggtgccctagttccctctctgcaggcgggtggggactgggtgagagcccaggggcctccaaacgcaggcggcagagacgtgagcagtgcttggctctgtctcctagacaacgggcatcaggaccaggacaggacatgagcgtgacagggagagcggggaggtgcctaggccgggagtgggaacccagcaccggccagaaggggctgccgggcggtacagaggccaatgcattggaggctgagggtagctgcgacctctggggcaggggacactgctgtgtggagcccagggtgggcgcccacatgggtgcctggccgcggtgtgtctgcctttcttgtctctgtttctagaagactgaaggacagggctttgtctgcatgaaccagaactcagcctccaaaactggacacagaaatagccaagaggccacactgcccagaggccaggcctggtgagctaggggagatgccggcaccccccaaccctggggctgttccctggctcaggatggtgtctcggggctaggattatggtcaggagtccatcggggcctcaagcacctcctgggaggaatcacccaccttgcccagatcccccaccccctcccagtgccaccctacggctgagtttccactctgcaaaccctaaggcagagacataagcccacagggttggttttcacgaatgtcacaagcccatgtgtctgggcagctgtccggcttcagtgcaagtctgtggtagcaatgaggttccaagtctcagtagctctgtttgcccagggtctgggcccttggggcaggagaaaggaaggctcctgccttcccccagctccttaaaaaatcatcttagtggtgtcaagttgacccaaaatttaagtttaaaaaaaatatatatataagtaaacaaaggagggaagggaaaaagggcccaaggagaccaaaagctgctcctgggcaggagcacaggcacacctgggtccctggccctcagttgagggatgagattcgtaccagagttttcacagcagcctccactgcccgacctgggagggacggcgagggactgggatgggcagctgagctgtgggttgcggggaaccggagtgggttcgaggaggtgatctactttaactggcctctgcgcatgctcctccggcagccactcggcctcctggctatgtctcctgggggaccacctgcatgagcttctgacacaggacggtcgtggagactgtcaggagagaagacagctgtgttagcctgggggctgggtaggcacccgtgggacacgggggcgtgagctggggctcccccagccctgctgtcaccaaacccagcgccgctgcccagcgctgggattttaaggaaccttcccttgtgtacttgcgcatgtgggtgccgggtgcccgaggcgctgtcttcaactgaaatgcggaagtgccacatcccactcggcccacccctcgcctgcttcagaaccctggggaggcagagtgcggcccctggggcacacgaaccaggccctggtgtctcagcaaagtgcaacggggggatgacaggccttcctgcaggtccacacccgggccaccacctggacacatgcctggactgttcacagcaggcagggccggaggggccaatctgctaacgggtcctcggaagacctgtcgcgcctgggactgtctacagagacatcactctgtggagggggactgctttcaggatagagacgggggtttgctttaagctcttggtgtcctgaatgacagttaatgcagatcccactgcaaagcttgaggcaaatgttctaccatgaccctggcggtgatcagagtgtggggtaggggtggggggtctccctgcctgtgttgctgccatcccgggaattctccaagccacccagtgacatggggatcagcatgtaggcccgcaagcaccccggcctttttctacgagcctggccacatttgcaggcgctgaggacggggtcctgagcttggtgacaaagcacccctggggctgccgctgcacacagggccggggggcgggtttctccttctgcctttttttttttttttgagaagagtctcgctctgtcgcccaggctggagtgcaatggtgcgatctcggctcactgcaacctccgtctcccgggttcaagtgattctcctgcctcagcctcctgagtagctgggattacaggtgtgtgccactacacccagctgatctgtgtatttttagtagagacagagtttcaccatgttggccaggctggtcttgaactcctgacctcaagtgatccgcctgcctctgcctctttctgcctttctgggtaagtctgctgtgtccgctggtggcagccagcaggattttgttacttggcagcagtagcctggttttccggaatccctcgtcctgagagattagctggtgctgcgctgtgtgtcttatccctgaaccatgtgggctgcgtgtcactggcggacactgcagtgacctgaaccctcctgccacccaacacgcttcgccccatgtgggtggagacggccgacgcctctcaactcccttcgctgcccagggcagagggtaccacgggctgtgggccagcgagatactcacagatgccctggaggagccacttgggcttgtttttccaccagaccccgaagaagtagacgggcagcccgctgaggatgatggtgaagccgatgccacactccacgggtgtcttccagaaggagacggcgatcaggaagaggcaggccaggatgaagaacacaggcagggccaggttcacctggggcagaggacagggcctgggtgagccctctcctgtccagcctccctcccccatgccccgaggttcctcagccctcctgggccctccacacccacggctgctgacttccaggtcaccaagatgcgatctgcactccatctgcctcacacaccgggctgtcccgccctcgactctgcatacagtgctgggcatgttgccaggggctcaggcggcttatgatgagggatggaaggagacagcttcgtctcccgaggcctcccacgggcagggaaggtcacggctccattcccacatcacaggcctggaaaccctgagccgccaggacgcacaggggcctgatgcttccaggagacagtggccacccactaataagccaggagaccaccctcttggagacgccgctgtggacagcgctgagcaaaagcccatccctgaagctgcagcctaaactgtcaccttcagcagatgagctccacccggcacagaagccaggcagggctgcaaggagcctgcaggccgcaacctgcggctcggcatggctgggggattgactcagctgtcctgaatccatacttggacagggcaccctgggagatgcagggctgaccacaggtcccagcccatcagtgtgggctgcatgactgccctgtccccagggaacagacgccaacccgtgcccaggctcacaacagtgggtagagcctaccccatgcccaggtccccatgggggctgagcccccgctgtgcgcagtgactgccctgtgccctaggcactgccccaggctggcacagcaggcacaagctggtgcccatgtagggcggctcctccctgccctctgcagccttctcttggggcagcatctgggttcttgtgctgactgtattttaaagcccctgttttttttgtttgtttgagacggagtctcactctgtcgtccaggctggagtacagtggcgcgacctcggcctcccaggttcatgccattctcctgcctccacctcccgagtagctgcaactataggcgcccgccaccacgcccagctaatttttttgtatttttagtagagacggggtttcaccgtgttagccaggatggtctctatctcctgactttgtgatctgcccgcctcggcctcccaaagtgctgggattacaggcgtgagccaccgcgcccagcctaaagcccgttcaacagcattcacaggcacccccggggcccccaggcttcgggaacacagagggagagatggtccgggcagggaagcaggggctactgtgacagccataggccagctgagtgacaaaagctgctggctagcagccaccaggggctctggcctcttgttctgtgtcagggccagggcggcgggacttgctgggccccaggcaagagcatggcctctgctggacggccccgtttttggagaaggcagcccacggataacagctacccctctgaatgagccgctggggacggggagagtccaggagagtccagctgggcccaggcgctcctcgggccgggttccctgcattcctcctgccagcacagccccgacggccctttgaatgctgcgccaggcccggctctgccccgcccctgccggggctcaccaccgcccacctatgactgcagtgtccttatctgcttccctccacccaacggagcacaagctctgtgccatctgctgtcctttgaggaaccccggctcctgcagtcacacttggcaccctcgtagctggtggtcaagtcatcaccggaattagtcgacccaggtgcatgcaggcaggggcaggtccagaggctgagctgggatgctggctcccaactcagggtccttaggacccacggaccctgcctctgtgaagggtgcctgggtgagcgggaggccccgggctcaccttgatgggccgctcaagctcaggctttctgtggcgcagccagatcatgccgatgatggccagggccacgcagagccagttgaagaagctgaagaagttgatgacggagaagatgtccttggagaaggcgtagagcagcgtcatcacacactggaagagagaggcggctggctgagccctggggcccacgagcagggctgtggacggccgtggtggccaccggggactgtccagcctggctgggcccagctgagcaccagggaattttgttttaaaggagaaacctcatctgagcaacatgcaaggtcttgaaggaggaaaggagggaaggagggaggagaggaggagggaagaggcggggaggagggaaggagggaggagaggagggaaggagggaggagaggaggaaatggagaccacatttgggttaaggacaggtgaagaacacagtgtacatacacagctgggctctgctggactgtggctctgtgtgcgagggccacaacctgacctaacccagtggtcaccaagaaaacagtttctgtaacccccggcacagccgtgctcccgaggaccgtgcagctgccaaagagtccaggacttgctgcccttcctgactggcttctaactcagggaaggagtagtaagcaagggccaggacctctgaggccagcccacagctgccagaccccagcttcctctgctgtatctcactggctttgggggaagcagcctgttgggggagcccagtgtgctcaggggtggggcctgcagcccacagccctggaggaagccactgtggagtggcctctccagccctggtcacaccctacgatgagaacacagcttcaggcaccagctccctgaattcctgacttacggaaactgtgagataataagtgcttttccttttagaacactacattttggagtgatgtgtgacacagccagagggaacaaaggcagtcacgcgggctggcacggaaagatgcaggagaagcggaaggaaactgtgtgtgatgcaccccgctgagaaacgaacagagtgggcgcccacggaggtgcagtgagccaggcggctggcagagcagcaccccgggtcagcttctgcctcccgcatttccgatggtctgaatcgtttgtggcagccaccatatattatttttggaataaaatctaaagcccctccagcgctctctggcattcagcggagctcggcaggaggccacatttgagctgtcacccagtccacaccccagacagagctgcaagctgtggcagcctccctctgggagcccccggacaacccccagggatgtagggcacagggccgtgcagcaggcttaccgtgaacacgagggacggcacgggggtgaggagctgtgggtggatcatggagaggatggagggcaggtggccttcccgggaccccacgaagaagagcctgtggacagacaagagtggcagagtcagccaccgccccacaactcagcacgtggacaggggacacgcaggctggggagtggcagggcctgtgcctggcttgtctgggcctctctggccacagtgggaaccaggcccctccagccgctggctgtgggcctctcagttcccccaaccaactcggcaaggacagcaacttgggagccactgctcactccagcccggggggtcaagcggcggccacagggcatctaggacaccacagctgtgtcacctccaggcaggagtggggaggcgagggccaaagttcatgcttcctttatttctgtattatttgggcttgctgctgccttttttttttttttttttttgagatggtctcactttgtcacccaggctggagtgcagtggcaccatctcggctcactgcagtctcaatcttctggtctcaagcaatccttcgacctcagccccccaagtagctgggactacgggcacgtgccaccacgcctggctaatttttgtatatttttgtagaaacggggttttgccatattgctcaggctggtctcgaactcctgagctcaagcgatctgctcacctcggcctcctaaagtgctgggattacaggtatgagccaccatgcctggcctatttgagcaattatgcatccccagtatcacagagacaaaccttttacagacatggaacatgttgaacctggccatgaggcctgggcctccctcacctgtggtgggtcgggctgtgctcacctggaggatgtgaacagggacccattgacggagccgaagcaggacaggcccacgaagacggggatgatccaggacatgacgcccaggtgatagttcccgaagtcctaggcaggcacaaccagtgagctgggccccaccgggccggccctcgccctccctgtgctcactgggagccctctgcaccgggccagccctcgccctctgtgctcacaagagccctctgcagaggacctctcaggctggattctggcctctggggggacttcccaggacagggctttccagtgacccctgcccagcctgcttgttggggagcccttgctggtcctgatttgccccctcctctgggactccctggagcaagctacggcctgcaggtggggatcttgccttcccccgtggggtcctccacaggctcagcacggtgccctgccggcagcgggctgggagtcagagcttgttcagtaggaagctggccagagcacccactccctgttcccccagccctgggagggcagtgggagaagcctcgggaactgcgaggccagcctggctgagctgcccggtgacaccgcccgggcctggcctcccgcctgccaagccagcagcagccgtgccttctaacgaaccccactctgtggcagactccaatctttctgtactcagatttaaaatgacctctgccctggactccccaggcattctggcttatagctggttctgggtgtggcttggtatcagattttaaacccttctcccctttgactcccccagcagctgagcttgaggatgatccccagacacttcctctgcggtcgctgtgaggggagaccaccactccacccctccgggtaggggaggcttagagacgcggggccccctctgcgtaggggaggcttagagatgtggggcaccactccggtctggaagggacgggctggccacagcctctcaggcccctggtggaagctggcgggtagcggctcaccacggccacggcctcggacgacagcatctgctcggtggacagggtggtgaagtaggccaggttggtcagcacgtacaccagcgtcacgatgggcagggagatgatgatggccaggggcaggtttctggaaagaacagggacgacatgtcacccaacgcagcccgggctgaaggccaaaccctgtgcccaggagccaggtgggctcctcgcaagcagtagctccagcctctgtgctgggcttctcggggaaggtgggaagcagcaagagaacacaggctggcggcaggaggctgtgcctggagcgggacactgcacagccctggctggtgccttggccgcggcctcagcttccccacctgagaaatggggattcttcggggtgacctcaagggctcaggagagttaagtcaggccacctggtctgaattctaaggctctgcccacgagctgcacagccggggaccagagccgagagcccaggcagctcctctgtaccgtcccgccctgagtggggccctcacttgccacccgttctctggagaaaccgtgctcaaggacacacggccagaagccacccgccccacatcctgctggccccagaggccccaatcacggcccgactgtgaactggcctgagccgaccaacaggcttcgagtggaatgtggctgcttcctgcctcacattaaaataatgaaaaaagacggctccatccattcttgcacgtacctgtaggggttgatcatttcctctgtgacgaaattcaagtaattcctaaaatttagagaacagcgttcaaattatatgatcctcatcagggaaaataaatcaccggggagagagcatcccagggcagctggtgagcctgccccccggtggtctgctcgctgggctggaaagcggacctggagtgggagggagctcagcctcctgcgtgttccggggggtccctgctaccccttccaggccctcccgcacattccctgcctgttcgccctactggggtgattctcaggtccctgtgaggcccgcctgagcgcaggagtcaggctggggacctggaggaaaggggccgcagggctcagccgcctccacctgccaccttcgccaagactgcgacgtggagctagagccagagtagggctgcagcgggcggcctccccacgcttcgtcgggatgtgggtgactctggagggtcacctgccactctttaactgccaaggggcagttaaagggaggggcagtccactccctttaactgccccttgatggctgggagatttgggattcctggacacgtcagggactgtatgtccccagaccaagggacccagacattccagaacctaccatcctccataggcaaagaggccgctgtataatgccagcacaatgttccccacatccagtttggtgccttcaaatgagaagttgggatctagattggacacatcacctggcagggccaaagaaaggaatgctgggttagagagcgctgaacagaggtcatgctaccagttctagaatgttcctggagcaaaatacatagcaaacaaaaatgctggagtgaaggcttttcactgtgacaaatggtatgtacctgctgagccacatggagggtgcagggttccaaccacaaccagggggatgtggccctgccagaggccctgtgcccacctgagagggcacaggcagttctgaccactgcccaggagggctcctcagacgcttgtctacaggaggtcaggatggaggggtcaaccagccccagttgccttcaagaaggttccctgagacctcacgacatgagtgtcaaggcagtataaagccaggagacctcggtttgcatcctggctacggcaacaaggaaggcccagagccactagggccctgcttcttggggtgcgaggagctcggaacagactgccctccctccagggctggcaggacaggcctgggcaagaacataggtttgtcctggaccgtgctgagtgtgtggccagctgcagccggggcaggggcaggagcagggctgccagggccgagaacgatccccgtgctgtgtgcagagctctctcctttgccctctgaggacacgcgtcactggacttcgtgactgctccaccctattccagaaggacctcatttcaaaacttgaacttcagtcacatctgcgaagaccctttttccaaataaggccaccagcattcacaggttccccaggaggacatgtcttttgggggaaggggtgtctccggaaggtcacgtggctgctgggacagcactggccctttctgtggctgttgcctcctctgtgaaatgggcctggtgtgttcgagcccggaatatattgcccagacatcagtctcacagaccactgcgcttcaggaaggagaacttggaaagaagaccaaagacaccaccggaacaaaggagccgggtcccctcctgcctacctgccaggtgcatatacagctggaggcacaagtggaaatcttggtcaggctgtggactgttagttcattagagaaccgtgtgtgacagtatccttcctgctggaaagtcaccagcccgtctcacagggccaggcagggacgggccctggggctgctgtgtcccaacatgtggccttggaccacaggtcaccatgggggcccaagaaggggaaccaccttggtggtccagggaacaccgcagagtgacgaggtgagcaaatttcaaaggggacccgtgaagggaggttcccataagaccttggcaattaccccaaacaaagtgcgcacttcaaaggtggcaccagatttcctacggcagagcccacggtggggtcccttcctgatgggtggacccagttcctgttttgcacctgcttccccgtggcgtgctggatgcctgcggctctgcctccagctctgtctgtcccagatgccaggtgtgctggggcctttgatcttcagcctacactgggggtgctggtgggttccctgagggctgcccgccaccctgccctgctgaggccttgatctcctgagaaggagctccagggcccactgcctgcgtgtgatgtattctggtcaccaggtggtcagcaggcggagcttgactctgcaggcctggagcgggggcagctcagagcagctcaggacagggcactttgcacagcacctcggcacagcccctctggcctctctcccatctgctctctgatggaatgttctggaatgtgcagacccttcacatctgcatagccctactgtgtctcgcccacttacttctgctggggggagcatctgtcctacaagtgggggaatgcagacctgccaggctgcttgagaatcaaggtcctgcctcccccatctggcactcatggtgggagggggtgaaggtgagccctggaggccagaaacacgtgccccattcactgtgaccacccccggactcagcctgagctgatggacaggaggcctcagtccaaggtccccgccagacacatcaatcctcatagctgacctccagcctcatgacagaaaggcggctgatcctacacagagggtggctgcttttgctaaggacaatataccgaggcttgacatggtatgaggtcttcagtcaggagccagatattggcagccctaaggcctgagtaactttttttttttttttttttttttttttttttttttttttgagacagagttccaccacgcttggctaatttttgtatttttagtagagatggggtttcaccatgttggccaggctggtccagctctgcttaagggtggcctggagggctgcaggagggacctgcttgcagcccagggcagctggacacagggaggtcaccacactcatccagtgactccacgctacacacaggggagagacacaccagaggtgggagttagacagcgttcaaaccctgggggcagcacccctgtacctctcagcatgaccagcgggcattctgcacaccgggagacctgggctgtcacgacggcggggtgcggcgctactggcacggagcaggaggccggggatgctgctggatgtcctgcaatgcacgggacacccccacacaacagagagcccacggtggcagaggtgccaggctgaggccctgtgcaagaagaccatgacaaggcatcagccacgagcctctacccctgccgggaggacaggaccagctcctctcagctttctctcccatggaccctagactcgggcgtggtcctggcttcgacatgaagccccaggcactgggcaggactggaaggaatggctgagcggcccactcatccagcagccacccagcctccacacctgacagtctgctatccagtcagcctccacccacaaggaggggacagcgtgacagggaagtgaggaagagaatcaccgtggacagacggtgacatctgccagagcccacagagacgcgagaacagactcagcgcagagcctgagtggggccctccagccccttccttgtccctaagaggcatcttcctcaggggctggtggagctgccatgaaagcaaacgcacagccaaaccccgggtggggggaaggcaaactgcaaacgccgcggcgaccccggcacagcagccctgtcagcaggattcccccgagagcggggtaattgcggtgggaacgagcgctccaaaggccctggggagatgatttcagggaaaagtggccttgatccctgagtcaggcagatgcggccatgggaaccatccaccccgaggctggaggggagactccgccggtggctaaagccatcctgctgacggggcccagggacgcccccagtggccaaacgcacgtgggaacgggatcttccccctcctctgtgatgcggccaaccctccaagcctctggctcctgactcagaggacgatgtctccccatgaacgcagtgtccctggagagaagagcctgcccagcgtggggaacatgggaatgtggagatggagggcatcccggaacctcagggctgacgggcccctgccccagccctggaaacacctcagggacaagagagtcactcctcaagcgcggactttccactgtgctggggccttccgccttccaaccactctggccccttggggctctaggtggagtgtgctgaacagtgtccccaaaattcacgtccagtggagctgcgggatgtgtcctagctgcaaatgcggtctccgcaggtgcaattagcgaaggaccttgagatgagatcatcccggattagagtaggcactaaggccgacgacaagtgtcctcagcgacacagagacagatccaggggagacagagccagagccagcccaggatgcctggagccacgggcagctggaaggggaaggtggcaccttgggtctggacctctggctgccaggaccaggaccgtctgcatgtctgttgctaaagccagtctgtaggcatctgtcaccacacatgaggggccaaccgtgccacccaggggagacctcccggcttctcagtgcatcaggcatggtcaggggcaggacagctgcagctcacaccccacttctcagtcaccagccgagtgcacagccaatggcacctcatctaagagggggctgtgagtcccatgtggtcagcaccctggagctagctgccctgtgggctcagggaagtcgtgcagtgaccgccacatgggttcagtccagagcccaggccagagtccatgcccaccccacagagtccacgcccaccccagagtccatgcccactccaggcagagtccacgcccaccccacagagtccacgcccaccccagagtccatgcccactccaggcagagtccacgcccaccccacggagtccacgcccaccctaggccacggcgccgcttttcagatgcctgtttcgctctggccatctaatgcctgggaaccgtgatggggcaggaatttgggtttgggggttctggcggcaaccagatggcacttttggaccaccagcagtgtctgtcggtcttggaaactcatgaaggagtgggccctttgcttagagctgccaacctcacaccagaagtaaaagctttttccaactccacaggcggggaaagaccctgagaactgtccccagcacagggctgtggctgccctggcctctgtccatgcgtctgacgaagggcaccgggaggtgaaggccgcgggaaaacaagccccgctcccgtcctttgattctgtcccagcacacggcaccggcagagccccagcttccccagcctgtcatcctcccgaggccgacggcacagaagaatggcaggcccaggacacactgagctcccagagcaagcggcgggtcaagcatcctttatcaactgcgaggtcttcgaggcccaaaagaggtgccctgagtcgcgaagtacccacccttggggcagccaacgccgcagccctggctccaggcccaggttgtccggagtggagccacactcgagcctggcaccaatctgggagctcctgagcgcaatgtcctgtctgtccctgcatgaccctgagactgtctgagatgcctcacagagagatgccctggagtcccccacaggcaggccagcctggaagcttctctggaaagtgagctttggcagctcgaggccgagctgtggccgactcctcccttggttaacacagcctgtacccagctgggattcactttgaggccctggggcttgccctatttcctgccaggagagcggggcccgaagctccatcctgtcccccaaaactcagacgtggaagccctaaccccggtgtggctgtacgtggacatggggcctctacagattaagggtaagtggggtcctcagggtggggcctgatctgacaggatccttgtccacacaagaggaggccccagacagctcactctcccacaaggaaacacagcgagggggtgtctaggagccaggaggccgagcaccccgcccagggcatcagggtccctggcctggcggggcctctcaccgactctcccgccggcatccaggtagcagggccctggcaccagaccctctgaagctgagacccacccacccaggcctgctccgctcttgctgtcacccccggagaaagcggcagtcagggcgtgaggtgaggaaaaggggctgttggaccctgcatggcagtggctcccgtgccggggacgcggtgagcctggcctcctccctgcaagggaggacagcccatttcccaggggaagacaccgaggctcagacaccctggccggggggcggcaaaactagaatcccaaggcagctgcacatctagcacctgcccttgccctctctccgggagggcaccctagaagcccacagtcctgatctggggttcggagagcaggctgggctgagctctgctgggagcgcctagaagcccagctatgggtccacgcacacactcaggtgaagccaggcccagaagaaggaacagctctaagccacagcccaggggggcttctcagtccacgaggcgacccctccacaccccagagccacagacagccaaggtgtgggtgaaacgtttttctcaccagaacagcccagcagctgggcatgtgctgtgaccactgagggggcctttgtcagaaacatcgtctgggggctggacgcccccacccacaggaagaggagaccaagacagggccgcacacccccagccagatgagggccagatgagggaggcggcacctcttcctccaggaagctcctcaggagggacatcgggaggggctcagggggctgccttcaaggaagctcagtgaagctcagagaccagtctgaaaaggaatgtcctccagacctccaccctctcaggatggacgtgttactcaggaactgtcccgtcagcttttcccgtaacacatgacaccccacgtgaacctcccaagagcagatgggcccagtgctgtccacccgaacgcaccttgggaacagaggtgtgggcctccccccagcagcgcatgaccctgcacactgcacccagggtcacagtgggggtggggagggacctgcccactgctcacggctgtgggacctggggcagggcaccccacttctctgagtctaaggggccctactagctgaagaaccaaaggaaaaccatcatttcaaaactgtcacgtgacacacaaatgcaggcccctgccccacagcccagtggcacacacgtatttaccgcctgggacacgggaccgtccagaagtgccctactcataggtgtaggtcacatccaggggtctcggccaccgggacccagggcccagcagctcagcaaagccattcagccggggtctgagccctgcccaggggaagcattttcccctcctggggtgaaggacagcaagaggcacgccgccctggcaggctgcggctttctttcctttttgtggacagagtgaaagggcaaatttgctccaggggaatactgacctccaacagtacaatgtgggaggagaaggaaaagaaagtttttatgcaaccttttttttaaatctgcccaactatccaatctgtaactgttcaaggagagattagtttgttctgccgctgacggctgcagcccaagcaaagcacaaagcgccccattgtgtcctccaggagggacgtgctgctgctgctgggctgggacggcagagcctgtgccctcgctcccaccctccgccctgcaggcgaaggcccagccaccctctccttaggcaacagcctgcgagtggactcatgggacggtgggtcagatctgaaccctcatgagtactgtctccctttcgaaaaggctgggactaactgtagaacctcatgtgacacctaagcctgcgtgtccccatgccccagcctaggggcagccatgactcccccaagacgcggaggaggcaagggctcccgaccactcaggcccctgcagagtcgcccctgtcactcagccagctgcccctcccagcccgcatctcaggaaaggcccaacccctcagaagggcttttctggtctgcaccagggccccgcttattccccactgcgactctcccattcacgtgcctatggctctcaggtccccccatgagctctggatgcggggccatgttctcattgggacccggcatagatgcggcacacgggacagaagatggttctgcggatggccaactgggaaggggtgattacaaacttccctgacgaggaggaaacaggtcagccaaggcctacaggaccctagggccagtgcctttccatagcacagggcccacctgggggccaagggcagcaaggaggagccttttcagccccaatggagcagggcacccagggtgcgggacaggcaggaacaggtgcgtgggccaggcctgctctgccagattttcgctgcattctccagacccggaaagggccacttgccagtcgttgcaaaattgaggccggagtctctgccttgaagtatctgggggcgctgctgccaggtgccagcgaggggagggggcagctgcccaagggctttgcgtccactggggggtataaagttggacaactgctttgggagaaaggggtcaacacaatgtatcttctaaaagcaaggcattcatctggtaacaaaataaatctgttgaagccaaacaggagacaggaattctgcagacactgcactgtatcccaaagctcagaagggaattgctggggggagcacggtgggaggacgctttcaacagctaacggaattataaacctattatgtattcaagtcgaacaaaagctctttgctctccctaccgaaatttgtttttacaaaaatcacgttcccctcctaaatctttcctggctatctgatgagcgcagccaagcaaaggccttcacgagcaaagcaccccttccgtgcccacttctgggaggcacaggatggatttgtctcctgcccgtaaaatgtcactcaggcccaaccacctccctgggcaacttctgagtgcccgggagccatggaatgagctcgtcttgccttgagtaaggtgccggaacctgaggtcccaggaaggttcagaattgggacttcctgccagccctgtcctgccagctcttgggtggctctggtaccccgggcgactctgagaatccctggtcagacacatgcatgggggatgggctcgagctcctgaaggattgacctgggcaaccttccagagccacctgggaatcaagtgggacttcccctcgacgatgaggcaggtaactaacacctgctgcagactttgtacagattgatacatttgataaagacagtctggccccagcccctggagctcgcctcgctgtggtgaggtcagtatagcccggcactgcatccccctgcaggcccaggttacctgcttggtgtggagacccctccccagctgcagccagactttgtcctaaggcgaagtgccacgtacagccagcagggggcgccaggagcaaggcggaggctcagctaaagctgcgtgctgggtgctgggtgctgcggggcactgttcagttcacagcccaccagtggcacggtgcacacaggagagcctcccagccctgaggcagggccccacacaggaggaggcagcgtccttgtgtctgcatgttttggcctggccgtgcatgggggcggggcagctcacagcttgctgggtgaggaccttcctgcctctaggagcaaggtccttgccctgtcctctgcagccctggggtcctacctgcctcccctacagccatgtgggaccaggcagcctctctgcagccatcggtgactgcgagtcaccagagcgtgcatccgccgggtgcctgcactcagcgaaagctccacagctccaggactgggatcatctctacctgaggctctgggagagaagagaaggaggccagctcctaactgctctgctcctaggctggctccaacatggatggagacaaactcagaaggaactgcagacagaggcatccctgctggactcaagcaacagggccccccacttcaactgtacccaaccacgggtgggatccagtgccaaggacagtgtgtcccagggtctgtgaccacacaaatgggaactgcttatgaaaccccagcccgacctcaccgcggaatggcagtgtggaaagggtggaggctctgcaggcagacacagaacacagatctatggagtgtgtgttaaagggtccagagacacccagcaaaataccaactgtgtcagtccacgtcaacagagaacacaggtgcaaaggggcgggggctgtttcacactcactctctttattccttctaccagccccaagagaaaaagcagctgggaaaaaggctcagaatcagtgatttccccaagatcacacagcacaagaccaaagtctgggccagccagccttaaaacctgtgcgccagactgctctcacctgttcccgaatgctaacagtggacacgtctgagtgatggggttaccacgtttgttttgttttccatgcttacctcatcttctttaaaaagcagacagaaacacagagacaatcccacacctgcccatggaatgatgaatgaatcacagcatgaccaggagcatggccccgtcgggggtgggtgaggggcgacagcacgtgggactctgacagacccagggtgagatggctcgggtgaggtctgcatggcaggcatagcccctgccaggcctggaatgttccacatcgcccccaggtgaggttacaacgcatcagctgggctctcaagattcacagacatcgcagcgtaaaaaacaagaaaaactgccagagcccctcccagtggtggccacgctgtcccacgggagcactcctgtgtccccctctgggtcggatttcacttgctgggtgattttcccagagggaaatctccacgttgtacagcactgcagagctgcggactgggaggcacccggggacgggacctcatgccctgtgaaggacacacaggcaaagcctcgaggggccgccggtggggcctgggggacgtactcacccttcccgatctggacgaagcccagcaggatgatcagggccagggccaggagcttggcggcggcaaaggcatcctggacccgggtggcggccttcacgctgtagcagttcacggccgtgagcagcactgtggagacagagggcagcggtgagttccacgggcagacagacgccagctcaggggtaggctgggaggtgacgaccccacccccaccccagggccaggtccaccagaaaaacaagctccttaaacagctccagtcccctgccagcccttagggcacgttctgactttctgagacctgttttgataaacttcgcagtcctttcaggtctaagggctggatcccaggtgccccttaagatctgcaagggacctttcctcaccccccaccacaccaggccatggagtcccacctgtagtcaggacttcaagtggggtcactgcctccagagacccaggtgagcaaggtgaccctgccacttggaaggcgcccattacacctttttgtacctactcagcaccctgacctgactgtgagacccacgcacagcccgactgccggactccatgagggcggggccctttcctcaaagaggatcttctgtggattccaacagaagtggggtgtcccgctttcccggaactacctggccagtcacctggggacggcagcctgggaggggccacaggggcctgtggtgagcagagcagaccctgctgccctgctgctttgggggcatacgatgaaacccaaaatagcaccgtgtgcttcagaagcctgagtgaccccacacagatggccagaacgcctgccccaggaggcgctgagatgtggggtcaggcacgctcagacaggtctccagacaccagcacgtcctcctgggccctgtaaggcacccagctctgagcctctgtgtgtgtgtgtgtgtgtgtgtgtgtgtgtgtgtgtgtgtgtgtgtgttgggggttctgttgcaatatataggcacgctgagccactgtgtgtgtgtgcgtgtgtgtgtgtgttttggggggttctgttgcaatatgtgcgcacgctgagccactattcagggatctgtgagctggtggggaaacagccacccccacaacttaaaatgaagtaaaatcatattaatcccgaggcactgactccacgacacccctcactgcctgctgcactacccttcactcctctgctcacgaggttatctgtcgctgtcagcagcttgaaatctgccagtgggaacgtctacaccccagaagtgggcaaaggcccagcacgggccacccacacagctcagatctcacagccctcccggcaccgcaccactaagactgcaggaaggtgagagcatcagaaaggccgtgggctcctcttctctctttccccttgggagtaacgctcagaaaggtctggccagccaaggccttgaggactccagtggcttttccccagctgaacaaatcctgtggaatcttacaatgtaagcaacagaccccgaggaaagacatccatgctaattaactaatgacaccggaaacgtcctgaggtgcgggacgggctgccgcctgcctatctctcagaaattaaccaccccgctacaattctgtggatgccagagcggagacggctactacacaccaggaaagtctggttgaaaaatgtctgaaagtcagtgttttcgctgctattcctaaaataaaatacttgaaattccggaacttccactcctcacccaaactgaagaggtgattcttcacctcttcccagggctcccagggacatggagatgttaccagtccagagctctccagtccaaccctcagggctcagcagggtcaggtcagtgggtctaggcagctccttgtccgctgcacagggcaaggggcaggtcctggcttgccagtcccatttccttatggttggggggagcacgaccataaaagaaactgagcctcggggacctagccggcttctggagagctttctggattcgcaagaggccggctgattgcatcactcgctcattcatgcccggagggaggcggggagtgggtgtggccaagccgcactcgaggctgcctctccccaaaagggagagaggcacgctgccaccactgaactccagacaccagacaggcgctgcggagacactgagcactgccctcgcggctgtcacgtctgcggctgtcacgtctgctagggggttggggggtccaggaagggcagcgagttgcccagaattgcccaaccacgggctgtcctgccacactgacgtggtgctgggtaatgacgccatcagggctgtcactgtgggtgggacagaggccaggacccccccgcccccccccccaccgccagcctgaccctgcctgcccagttccaacccagccgctccccaaccaaaaacagtctggaggggctgacgggtgccaccgggagggttcaccagatcatctcctgacgttggaaataaccacaggacagacaggcgggggccgggtcttgaagtcaggtggggagcaaaatggccatagaacaaaggggaccttatatttattccttttataacaagaacataaattttcatgttcactgactttgggtgatgagtaaacaaaggtttcattattctccacagtgtccttttttttacgttttaagatgagataaaatcttaaacaaatacatgaattcatctgggttcagtacctttcgaccttaaggaggcgaggcagtcacaggataagtctggggtttgaacctcagtccctgctggcacttgccctctcccaagcctcagtgtccacaccatggaggggctgctggctgcccccacagcagggagatcgacagggctgtgccctgagtcagagtgagggggctgagcacacagggccagccacccccagataagtgtggccgcgccagcctgcggggacagctgggccaggagataaaacccgtccggggataccccgtggcgtggcttggcttgattggcagatagccgggcaggctgagctgggggcccctcccagtctggggtgctgtcttccccgtcctcacctggctgcctcccacctggctggctggcaggggctccagaggagctggggtgccttgggggcagtgcattggaggaacccctgccctcctcctcccttcacctgtgtctccaccacccttcagggccatcagccacagaaacatcctcatcttcgggtgggcattgacagcaaggcccacagcccggtgaaggaaggacagccctggccatacccagagccagcgccagggccttggccaggacacctgtcacagtgaggcccaagctgtggtcctggtcctgactcaaaagccacttcagataccctgaggctcacgcaggagggattggggacgcggccagcccatttctcctcaggaccctggggtgggcaccaaggcctcccactgctctcgccacgtgccctgctgctcagagctggggcgtcccggggaggttgccaccacccagcatgaggtgggggacacccccacccccttgtgcctccccatctctggggtggggccggcagtgatactgacctcagagaccatgcaagaaggcacctgaacagggagggcccacagacgggacaggtgcatactgctggctgggcccacagacgggacaggtgcataccgctggctgaccccccaactctgctcaatcacacacgtgcacacacacgcacagcacccccacaacttgtaaaccaggaggctgccttctcctggcccctggccttacccctctcccctcggggggatgactctctgaggtgcctccctgcctgatgcccgtgaacgctcacctctgcggcagccggctctgctcacctcccctgatgctggcatcttggtctcctggccccaactctgtccagctcctgataaaatcccgctacaagcaaagggatgatcccccagggtccagtgttggaggagaggggtgggggaagggccagtaacaggtgtgttcaatatggagagcaggtgggacctgtgggccccggctgggtggggaccccgcaggccccatgaacccaccccacacggactaatgcctgattctttcaggtaataaacatgtaccaggtacaggagcatccgtggatagggttcagggtcagccacaatgaaaatcctctctgttggccacagaggctgctccctgggccgccggtcctcacctgcccccgagccaggcacagcagtgagtcctgcagggctcagcaccttggcctgtctgtaagtgggagtacccagtgaacatgatcctcccgggccccttcgagcccaaacacagccactgtgagtgccccaggcaggcgtccagcccaggcaggcatcctgcagtcccttctgtcattttcagacccaacagaaacagaagtgctcctgccaggcccccgaggactgcctccaggagtcatctgtaatgacaggctgtgttccgcgcacggtttcagagtctgtccagagggccaatgctggggctggggcagagatggtccaaggcctgtgagctgtgcagctttataggcaaatgacgattgtttacccagaactgcctgctggagacagcacagaggaagtggccggcagcttcatcagttccaggaagcccaggcagcctggtcccccagggtgcaccgggcacagcagttcgcacggggccggagagcggcagctgaccacagcaactacagctggcccgacaccgggcacaggtaccagcccagcccagtcccgcccagtgcagcctgtggcccctagcggagccagcacctggcaaacctgacacccagccttggagcttgggcccccctctgcagctggctggggctcctgagacagcttctttgtcggaatccactcggtacgcacagggccccgaacttggtggctgcccagtgcacatggggctttagtagaaccagtaccttcctccctggccccttcaagtctaaatatcccctgctctgagtacaagcctccaccttctccaccgacagacagcccccaccatctcccgtgtcatcccccgggggaacttataaaagcagtggtgggggaggcggatggaaacccagagcttctgatcaggcaggtccgggagatggagacaacacatctgcacagaacaaggtcccagggaggctggtgctgccggcctggggagcgcccccagcacaggcgcgtgcttccctgatggacacgtcaccgccccgggctccagaaaatgaatgtgtctgacccagtgacccctgtcctcacccaaggccaacctcaccccagaatgggctggaatgccaagcctgcccatgccggctccagatccacctgcctccctgccactgctggccagagagagaggtcaaagtggtccggaaaccccaaggaaaatgaagcagttccggggcagggaagcaaaggcagcgttcacattttttttttttttgagacgaagtctcgctcttgtcgcccaggctggagtgcagtggtacgatcttggctcactgcaacctccgcctcctgagttcaagccattctctcacatctacctcccgagtagctgcagcctccgcctctggggatcaagtgattctcctgcctcagcctcctgcctcagtagctgggattactgacacctgccaccacaccggcctaatttttgtatttttagtagagacaagcgttcaccatgttggccgggctggtctcgaactcctgacctcaggcgatccgcccaccttggcctcccaaagtgttgggattacaggcgtgagccaccgcgcctggccgggatggtctgcttataatggctcaattttgatgcccagtctctgcagagcacaaggccccacctttgggccggacatacagatgtccctgggcaaacagagagatgatcccaaggccctggccccacctgtctgctcagtgttgaaacagatttctgtgaaaacaaattactaacaggctggtgtcacattttcaaattctgtcaccagcccttgaacacatgtctttgtacttttttccatttttaaccggggctgagttacgcccaaccacactgtcctggctggcacgggggaggaggtgtcagctgctgtccagaatggggctgacacattcattttaaacaggccaggaagatgcagatttggcaagctctgaaatttgccaacatcccaagtccagggtaagcaggagaactggaaaagggcagcttctcatgtggtcaggttctcctgacacaagcgtcctggtggatttgggtttcccaagggtcctgactccaggagacccccagggctgacaggaagggccaccgctccctctgaaactctgaaaccaggccacccggtgctgaaatgctgtgtgaactccggcaagttcctttgcagggactgagcctccctttcctgtttccaacagactggaacaactgcctcctgctgcatgggcgaaatacctcgcggacgtgtcttacggcgccccatgaaagcatcaccattaatctgaccagtcaccgcagcatgagtatcttcagggcacagatgaagccgtgggcaccagtgataaggagttgccactgctggctaagtgcggagcctcacacatctgtggtccggaaacccacgccccactccaaaccctctacagctccaacagttatgctaacaagaaaaaggagtgaaaacccgctccagtcacggtattgtggaggtggaaggacacttgtggcagccaatccaacacctccattttatagccggggtaaacgtagttcagagaggttgtcccacttggtgaaagtcacacagcagttcctgggcggcaaagtgaggacatccaggtctcctaaatctcaccctcgtgctctggccacttgactgggattttcaatcccggctgtcaaagagaagcaccaagtccacttgggctcctggccagcgtccaagccagtccaactcaacagcaagcggaagcaaataccacacaatgaactcgttgaacagactctgcgctcaggcttaaccagtgcacagcctgtacacccgacaggaggatgcagctgttccaagctaaggccagggcctctccccaatcccgatgggctctgcagatgcagtgatggaagaatccctggtgacggggagcccttagctctgagcaggacctgaagccatctcagggcttgcaccggcccagatgctgctgcacaagtgctccaggggctcctgccctgccctcctcacctgccccctcacctgtcagggatgtttgattcctggctggcccctcccctacctgacccctgccaaagacccacgtcaccccaggcttccagctctgaagcaaacgaccagagaagtcaagcgcctggctccgggccacacagcttgagggactcagagctccagggacagtgcccgggccctgctcaggccttctgcagaggccctgggctcttccagttgactcagctcacaaggcccctacacggtagcaggtgaagacagggccccaagaaccctcaggctctgaagccacacatgagagccgtggacagaatcctgcattggcctccagcagctcgagagcacagggacaaagctggactggccccggggtcaccatggccttggttttgtagcagctgcagtttgagcacgtacaccaaaaataaaattctaagccccgtaactgactaaagggacccctcctattgccaaagggatattccaaagttaacctgaaaaacgagctcaggtcacgatgggaagagggggtcacacaggccttgttataccccctccctctggaattcaggtacagcggaccagcactaacactcaaacacagatcttggcctggctcagtggctcatgcctgtaatcccagcactttgggaggctgaggtgggcagatcacgaggtcaggagttcgagaccagcccgaccaacatggagaaaccccatctctactaaaaatacaaaattagccaggcatggtggcggcaggcacctgcaatcccagctacttgcgaggctgaggcaggagaatcgcttgaaccgggttgcagtgagctgagatcatgccactgcactccagcctgggtgacaaaaacaaaacaaaacaaaacaaaacaaaacacaatattcgtctccacaacctcctgtcttacccagatactcctttctattgataccaggtctttagctaataactctttcaaccaattgtgaatcagaaaatcttttgccaggcacggtggctcacacctgtaatcccagcactttgggaagccaaggtgggcggatcacctgagatcaagagttcgaaaccagcctgaccaacatggtgaaacccccgtctctactaaaaacacaaaattagctgggcatggtggtgcatgcctgtagtcccagctactcgggaagctaaggcaggagaatcacttgaacccaggaggcggaggttgcagtgaactgagatcataccactgcactccagcccgagtaacaaaagcatctcaaaaaaaaaaaaaaatacacacacacacacacacacacacacacacacacacacacacacacacacacacacacatatatatataaagaaaaaggaaatcttcgaacccacctgtgaccaggaagcccatccccgccttggagttgtcccgcctttctcggcagaaccaacaaatacctttcatgtactgactgatgtctgcctgtaacttctgtccttgtaggaggtatgaactccagctgtggcccaccccctggggcacatgtcctcagggcctccaggccttggtcctcacatttgactccggataaatctcttcaaacattttacagagtctggctttctcgttaacaagcagctcacacatacagtgtctcagtagtgacagatgctggcccaccccgaggtcaggatgactcagcagggatcgagtttgcgggcgtcacgctccaaggcccagaataggaggtcggtgctcattcctcacgtagtgggcaaatcctagggcaggggaggggcgggcaatgccagagaacggtccccacctggggtggtctgacggccagggatgcagggagagacgcctcccacactcccggaggcacgcacgtgctgtggccaccccggagggtccgccttccagagggagaattcaggattcggccagtatcagggaaggagacgctgtggggggccctcctgttggaaaagggcagcagcgggaagagggtgctgccacagggcctctggggagcgtgcgggcacacagtaccaatctgcatgcatacacgtgtcctgtccctgcagacgggccaggcaaggcctgcccatggccagctatccaggtgatgctccagggagggccaggcctactggggggcagaaccctgtggctgtccagggtacctggatgtgagtctgggaaggatggagaagggtggaggagcgcaaagggcccctaggggatgctggggaacacagatgagcctctgacccacctgtgtccttacctgggccgactgggccacccagtcttgctgactgacacctccccagacccctggcacccaccagactccccaggcgtggctttgtgctcccctatgcctgatgacaaatggtggcctcagtgtagaggtgggcactgtggcccctggctcctggctcgctcctgcctcagtttccccagctgtaaattggggattatcactggcttcaaaggctggagtgcaaagtggtggccaagaggtggccaagaggtgccaagaggtggtccaagagtgtgccctaccttggacacccctctcctgggggtggctctcaacctggcctgggcccccgggggtctgcgcaacccacccttctgtgtgaaggcggctgatacacatttctgggcaagattctgcacattctgctggattatgaaagaggtctgtgacccaagaaaaaagggtcacaagtgcccgttaggctctcctgtgtggctcaggtcatgtgcttctgtgagctccccctacggccttgccccgaatcccgtgatgcagcgtgacctgcctaggtgccggcggcactttcatgtgcggctgggaaagtcagatttcagcactaatcactggctgccgcctgcaatgagcccacggcttgagctctggggcccacccagctccttaaacacgcagaacctttgccagctgagccaggatcccagctgtggggggttgggggtggaggggtgcagggatcccaaaacccaacccggggccaggttttacacaggcctggactgagaagtggggctacaggctacaggtgcttgataccccaggggggccctggaacaggcctggactgagaagcggggctacaggttacaggtgctggataccccagcggttgggggggtggtgctggacacccagggggcagatagaggcagccaggcagcctgaagaccctggggcaaaacacacacaggccccctctgctctctggtcactgctaactggccaactggcctttgagtccactgaccacagctaagcccacagccatcaaaacccaccccttacacccttcaccctttagggaggggctcagagacagttgtggcgattcctacttccacccatagccccccgaccctgggcctgtgccgagcgtgggtgggtgacatcatctcgcacccagagctccagactaaaggaaaccctggctcctgtctctggctcttccctccctctctttgttcccttgctccttccttcttttgccagaggagaagacagtgaggctgagggctgctccatgtgcacagtgagcaggagatacaggcacgtggagggacggtcacagcccgtgcaactggcaccttcacacgcagaggcctgggattcccagacacctggcgctggggccaatcccattccacagtcagaaacaggctcggcggggccaggtggatttctcaaagccttggttgcttttggcctgatgctagctggacagtgtctcagctcacaggttcctaaacgcatacccgcccacaccaatctgctgaggagtgacagccatggggaggagagccacctcactccagggaccctggcaccgtctcccatgaggccaggtgtcctcagccacccgcagccagagtcccgcgagaccgacggacggcctgcccctgcgtgacggcacgcctgggactgtctcagcagccccccatgcttcacccaactgggacagggaaacaggagggggctacttctgctttcaaggcatggaggagctgtctgcaggccacttcccgaacacctatgcgcttggagaagtgactgagactgagccagggtatcttctccacgatgcagtgagcccatcgggcccttcttctgagagcacctccctggaggtggaagcccctgaggcccacagcatcttctgaacctgtgagttcccacttactgagaactcgcctggatcagtgccgggccacagtggaccgggactttgagtggatgctaccctactcgctatgcagagccagctggggcccagggaggtcagataaactgcccaaaccaaatccaggcccagccagaatctcagctccagcctttgcgccttctgataaaacccagcatcgcttgaatttccagtacacgctgccaagtcttcgttaagcaataaataaccacacaaccctactgtcatgccaagttccatatggccatccagaaagagacacatggagctggttcctctcacctttatgaccagtgaaaagcgcaccaacacgaagacacgcgtgaaaggacctcatctcctacccagactgacaagcaagggatttttttcactcaccgtcagtgggatggttctaagcaccgaggccaacccatttcacacgattatttcacaaaaagaaaccttctgtgggacgtgcctgggcgactgaaaagacagccagcaaaactgagaaccttgttctcaaatctataccctctcccaaggcagcctcagaggcccgagggctgaggatccagacccgaaagccactgtaccttctgtaggatcaggctcaaggaataagggggtaaaaggtgccctttcccttcctaagcagaaaattccagaacccaaccttatgtgtgatcatttaaaaatatatatatatatatatatatcagccgagtaggctgactcacgcctgtaatcccagcactttgggaggccgaggtgggcggatcacctgaggtcaggagttcgagaccagcctggccaacgtggagaaaccctgtctctactaaaaaatacaaaatcagccaggcatggtggtgcatgcctgtaatcccagctactcgggaggctgaggcaggacagtcgcttgaacccaggaggcagaggttgcagtgagccgagatcgtgccattgcactccagcctggacaaaaagagcgaaactccacctcaaaataaataaataaataaataataaataagtaaaataaatcactttctatggcttttcactgctccaggagcaatgtccacagatcaaacgcccggcctctccttcacaccctggagcgcccatcctgcccactggtccgggctccaggctgccccctgcacctgtcagaagcccccctataagggcagggtctcccttcccgggacatccactgcccttctccgagctgaagtcagaatgacctgagaatcagcttggagttctaccagcctcagcaaagcccacctctgcgacagcactccttgcagacccctgacccggtgacagatgaataaagtacagacacacagatattctgctctgccagtccagctgagggtcccagccgcttataggctccctgctgagtcctgtaaacagttgctacttggccctgatcagctagtcagacgtgcatttattcagtatgattaactaacaaaagcttgagtcaacaccattagaatgtaacagacattgtggacttcccaagtaaaaagcacttaaacacccacggtcttaagattatgcgagtaaacaagctagctaggtaaactacgctgcctttcttttatcactatttttatttgtttaattaaaggtaaagggatcaggccgccttcagccagagctaattaccgaagttatgccaacttctcggccttccaagatttgtgtctatttctataactatctctaatatctttcccaccagaatgattgaaccccaacacacctccctctctcagcagggtctgcctgttcagagaacacagcttctctttcttgccttacacacaggggcaagaatagattcactcttgcagagagtacatccctttctgttactgaaaatcactttccaaaaaaaaaagcaacacatacacacatactcaccacacacacaggtgggtcagagaaaaaaaacaagtacaaatggcttagggacatgagaagtgtggccctaactttcgctgaaagggaccctattaacattaaccctcacctctgggtcagagagggttggcactctagggcctgccttgaagctttacctactgggaccaaaaggactgcttggaaagctattttaggccaggtgtggtggctcaagcctgtaatcccagcactttgggaggcagaggcgggtggatcacctgaggtcaggagttcaagacaagcctggccaacatggtgaagccccgtctctgctaaaaatacaaaaaattagctgggcatggtgggcacctgtagtcccagctactcgggaggctgaggcaggagagtcgcttgaacccgggatgcggaggttgtagtgagccaagatcgtgccattgtactccagcctgggtaagagcaaaactccatctcaaagataaaataaaataaaaataaatttaaaaaatactttttaaagccctattaccacaaaataaatccaggaacgcgtgacttggtacagcctctttggaaggcacattagctattacattagaatccacaccccgccgggtgcgatggctcatgcctgtaatcccagcaaattgggaggctgaggcacatgcctgtaatctaagctccggaggttgaggcaggagaatcgtttaaacccaggaagcagaggttgcagtgagcaacgagcctgggcaacagacacagactctgtctcaaaacaaaatcaaaaacaaaaagcaaaaaaccacatacccttttcccatttgcacaaagctgggaaaccccaaatgccctccacagggttctatgggggggcgggggtgcggtgagcacacttgttcctgccgacacagggaagtcttcttagcagctaaagagggcagcctctgcgtactgcctgggaacatggcaaaaccattttaggctttaaaaaaaaggtggagaacaagttgtacattatgatcttttaaataaataggccagcgatatatttgtaacagaagcagctccggaagcatacactgtcagccgcagaaactctgggggtcgggggtggtaaaggaggagaaatgtgtcacccaggcaggagctcagtggcaccatgcttggttcaagcagttctcctgcctcagcctccgagtagctgggactacaggtgtgcgccatgacgcccagctgatttttgctttttttttgagatggagtttcgccttgttgcccaggctggagtgcagtggtgcgatctcagctcactgcaacctccacctcctgggttctagtgattctcctgcctcagcctcccgagtagctgggattacaggcatctgccaccacacccagctaattttttgtatttttagtagagatggggtttcaccatgttggccaggctggtctcgaactcctgacttcaggtgatccgcctgcctcggcctcccaagtgctgggattacaggtgtgagccacagtgcctggctggtttgaatttttaaatgatgatgaattcatgtatgactgatgtgatttttattagaaagagaaaactaggcagcgccccatcctacgtctccttcctggtggccaatgaagcatttcccacgactcactcctggcaccagcaggaagtcagagactcagcacccaggggctgcttttttttttttgagacaggcttgctctgtcacccagactggagtgcagtggcgggatctcaactcactgcaacctccacatcccggagcatgcctcagactcataagcagctgggattacaggcgtgagccactctgcccggctaatttttgtatttttagtagagatggggtttcaccatgttggtcaggctggtctcgaactcctgacctcggtagatccgcccgtctcggcctcccaaagtgctgggattataggcgtgggccatcacacccagccaaccaggggttcattttttaaagataagagtgcaggctgcgtaagctactatccatgtcgttacataccgggccgacatgtacctaggcgggagggagactgaaccagtgaaattctaatgacaaaaaaagaaatcagagtcatcccctacattcacatctccaacgcccagctggaaggcacaggctctccccactgctgtcctgctacgatttttcccggctttgacctgcatggtggtgcggctgctcgactcagagcctcagagaaaccacacagagccctgctgagtcttgccctcggggcattctcacatttatgaagaaatgcctccccctccccctcccccccaaagtacggtgtggcagaaaacagcgccaacaggtcctgccagtcagaagccactcccctgatttcatggctcaagaccccaactataaattagcccttcccaccttgaatgtgtacacacactattgagatgcaggccgatccatgccatgggatgaatctgagaattgccaagacccaccttcccacgccacccaaccaaatcatgtggcatctgctacaagtgattttccccctgaaatcccacaagaaaactattttgaggccgggcacggtggctcacgcctgtaatcccagcactttgggaggccgaggcgggcggatcacaaggtcaggagatcgagaccatcctggctaacacggtgaaacgccgtctctactaaaaatacaaaaaaaattacccgggcgtagtggcgggcacctgtagtcccagctactcgggaggctgagccaggagaatggcatgaacctgggaggcgggcttgcggtgagccgagatcgtgccactgtactccagcctgggcgactgagcgggactcagtgtcaaaaaaaaaaaaaaaaaagaaagaaaaagaaaaagaaaactattttgaaaagcagttatctctggcctggtgaagaacacaccagcaccatgcccaccaaaacaggagccccatggctgtttcccagagaaacctgggacccgcacgtccattcactgcaacacagactgaatctgcagccaagctccgctctctcactactgggaaccctcaggggggatcccttagcctaaatcagcaccagtcactacccgcacacgatgttattactactgttttcttatgagtcagcccgtgtcactgattcctgacgagctggtgtggagagcagaaatgaatgattttttttttaactgcaatttccttctcaccaaccagtcagcaatcggagctctaacagtaaaccgattgctcagttactccacgtgggtgccacgcaagaggctgggagtattgctcagcggggccaacgggagggtggcacttgcctaaaccgcttaagtgggggaatggaatgcccaccgaagggcagggcagggaccctgctgtcccgtcactgaagatattcccagcctgtggggagaagtgtaaaagaatgaatgaaagaaacgcacgtggtttctgggaccaatgaccttagcctagaactgccgggatggtccaggaacgtaaagatgtagagatgtgggagccaggggcgtagtgatgcaaggatgcagggacccagagactacgacctcccaacccccggcccgcgccccgtactcacgcacgcagaggcaggccacgagcttggctgcctcctcgggcaccgggcaggtggggaagagcggcttgagcaggtaggtggcgaagaccagggccacgatgtactgcgatgaaggccggatgatgagcagctcgatccagagcttgaggaaggcgggcagcgagccgtagacctccagcatgtaggcgtagtcgccgcccgatttggagatggtggtgccgagctccgcgtagcagagcgcgcccacgatggagaagacgccgcacgcggcccacaccaccagcgccagccccggcgagcctgcctccttgagcacgcccgtgggcgtcacgaagatgcccgagccgataatggtccccacgatgatggccacgccgttgagcagcgtgatgttccgctgcagggtcacgccctcgccctcgcctgccggcgccgagccgtccgcgctcttggcggccagcatcttctcccgcgcctcttccttctcctcggccgccggcgccgctagcgcgcgccgcttcgggcccgcacccgccatgctctgcgcaccggccgggcctgggacacccgggagccgcggcccagcgagcagtgtgcgcgccgcccgccgcccgcagctgcgtcaggaaccccgcccgcgccgccttttaggccccggcccgccggccccgcccaccgtccgcggctcctccccgccccgtggcccggccccgtccctcagccccgccccctcggcccagctcggagcacgtgcgtcgtccggcccagcctggcgggctattcccaggcccgcgtggtcctcgaaggccccagtcctcctgcgccatggagaccccggcctcgcgacctcccccctcccggcgcccgcgtcatcccagcccgtcctcccggatgcgcctgggcggggcctggcagtcagggcgcgccccttcacccactggcccgcagcctctcgtcaagcctgggagcgggcagtgcaccagggctggcctgaggccaaggatggagtttggggtaccccccgaagggaacctaggctcctgtcccggatgggccgaggggatggaaccgcccccacaaccagctcctggggcacgggggagggatgagaggatgacctgaggggaagctcctgcagcctccttccagcctgggggctgcatcagtggggctggtgagccgcgaactgggacgagggaagaaccgaaccgaggccacccagtaattcccattgtatcccaaaagaatcttgccaaagacggcgatccggtgcccgtagctttgagaagcagtaataacacaggctttgggaagccagcaatctgcctgagctcaatttaatcaacagaaccgggggttcgctgggagccataagacccccacccccaaatctacctggggaattcaaaggcaggcttcagtgtgaaggggctttaaagcttgttattcctagggaatgcgagaggcatcttagctaaaaagggttgagaggtaatttcagttagaggcgagagcaggatgccaaggctcctaggcctggaaatgggaaggaatataaatactgccccgagattgaccagactggtgagcggccaaagacctgttcaaagggtgtgtgtgggtcagggaggaagctcctcagtatcaccccaccccggggttccttggcgtgtgtgcaaacgagtccttggaagctcacagcaggcatgtggggaggcctttgttctgggtgagcgttcagcctcccagggcaaacacgcaaacaccggttgcagagctgggtgttcacagcaagacagtctgctgggcagatgcctctggaatccacagaattctgaacaatagccgtggtggaggggggtcagaatccctgtcgtgctgggacctctagctgcagccaggaatgtccaggccccaccccagggagggggcggctgaggaatgccagggcttgtcattctggaccttgctcgccccccggtatgtcgggcattcctctgcggtgataaaaccgagcgaaatctcagcagcccaggcagccacaggcgggggagtgcggaggtcacacagatactaacttgtaatctgccgtccacattgctggctgtgg

SEQ ID NO: 560 - DNA, 47028 bp, Homo sapiens
  source 1..47028: mol_type = genomic DNA
aactcatcctgtcccatctttgcccttctacctgtgaaactttgggcacattgcttcacctctctgagccttagtttcctcttccgtggaatggggtgatgtatagaactggcaataggtttaagcagatcatgcttgggggggtccccatcactgccagctgctgttagcacaggcctcccttgctttcctgtgcccctgtagtcaatgccctctactgctcctccagcaacctcccctcctcacatcaggactctccagagagtgatctacatgccctgactcaatttccccacctcccactgcagatcagtgcaccgtctgcccctacaccttccacaaacctgttctcatcaaggcctaaagccaaaggtcgatttttttttttttttggtagtggggagacagggtttttctctgtcactcaggctggagtgcagtggtgcagtcctagctcacggcagcctcgacctcctgggctcaagcaatcctcctgcttcagcctcctgagtatctgggactacaggcacatgccaccacgcttggctaacttttaaagtttgtggagacacgaggactcgctatgttgtccaggctggtcttgaattcctaggctcaagcgacccttctgctttggcttcccaaagtgctgggattacaggcgtgagccaccatgccgtgggcctattgtcttaccttggacttcaggttgggtgcggccggtgggaggaagtggcaggagactagcaggtgggagcagaatgaggtcgaggtgcttactctcccggcgccccgctatccccagtgcaggttggtgatgcctgtactcttctactctacagactcaggtccccaggtctctgcagcctcgggtgcctctgctcaccccttctagcccaggtatggcaactgctccctctgctgctagccctggggtactacaccttccctcgttttccccaaccctgcccactcctcagtagccctttcacccaactctccctggctactccgtttgaatgaacacaccacctctctcctgccaagatgcactccctgaactccctcacgcagccccatccattctctctctcaaccactcccttctcaccatcgccctcccaccctcctactcccctctcccctcgtctgctgcctctgtccctgctccagccttgtccctggtctcccagcccccagtagccaggaggaacgtctcataaaataaatcaggtgatatcaaccgcctgcctccttcccccacttaaatcccttgcaaagctcccctttactcttaggatatattccaagctccctagagtggctgataaagtctcttatgatttgtcctcaagttcactccccacgcaccccatacctcgttcatgataaccatttccagggctctgaaaaagccattatctcccaactctgcacacctttacacaggctgtgtcctttggcacaacacacacacacacacccctcctcctgtaggatctgagaaaattacttgctttatttaggaaaccccatcaaccccagctctttggctcaggcaaatgaacgtctctcttttgtgttcccaggatgcccataaagagaaacagtttgtggctcatgcatgggggcgtggctagtggaagcccctgactgaagcaggaaggcgtggctgaagcacgactgataagtgggggtgtgattagtggaagagctaggctgatgaatgggggcgtggttagtggaaacccgtaattgacggatgcgggcgtagcaagtggaggagcttggctgatgaatgggggcgtggttagtggaaacccacgactgacgaatgggggcatggagagtggaggtgcgtggcttgtggaagcccatgactgatggatgggggtgtggctagtggaagagctaggctgacggatgggggcgtggctagtggaagctcattactgatgggggcgtggcgagtggaagagcttggcggctggaccccggcgctgctgctatatgtgggtgtgtcccgcagacgaccgcgggccgcaaaaacccagattacttggtttaacagttgcccaaatctcagtcagagaccttattagccccctcctcctgaatcccagcttcccacgggactgtttttcaggcagaatttcaaagttttatggcaacttttacagaaatcacagaaaagagacagcgactgatgatgagctgggggagagaagggtagtgggtaacgggtctgggatgttggggctgagcacaacaggacgatagaatgctgaaaacctgtgggaagcagaaagttatgggggtagttgggtcatcctaggggcccaaggagtgggtggcactgcccaaatgtgtcctttgggcaggaaacatcaacagtaagaaaatgcagatggcctaccgacagatggaaggcctccaaagttaaaaatgcccacccagatcccttggcccagtcccatccccccacccatccccaccccccatcaggcagagatgtggcagcatttgctggcttgtagcattggtcctctgggaccctcggtctcctcttcgagggtcctgcccggattggctggcactgagggcaaaaggaaccttccagattgtcaggggagatcaactggactcgctttgattcccggcctcctccccaaagctggttctcatggctgagggagtctgctgccctctcaaaagttgtctgtcacccccttttcccaagacatgcaccctcccgcgtcccccctcccccaaacacactatatacacacacaagcccctccctccaaggcgtggctgggctctcagaggtagtggagggcgagtgggggagctggaatgtctgaagttgcaggttcaaaatgtgcttcctccggctaagccctgggactgaaaccccaaacttctcccctcgtctccgagcctggagaatgagtgtcctcccaagaacccgagtggagggattggaaggaacggtgtgcggcctccttgcgcgcacacccacccgctcctccccgccggggctgagcggagctccctgagggctggggggaagggctgggagctgagacggcctctgacagcctccttcgagggtcccccagggagggtgggttctgaggctctgggacatggggtgaagtggggggggggtcactaggggaagggagactttgggggcaaagccaggctgggtgaccaaggagagagaccttaaactccccaggatggttactgggggtggttccctggggaggggactggggtggaaatttccccagggatatagacggtcaccaacaggatgggctggagttggggtcaccgcaggggaggaaccggggaggctcccgagaggaagagggaaggctgagctactggggacacagaacagggcaatcaaagccaggggagggggcggagaagggaggccgagtcccaggagaggaggccgagtctggggggaaaaggagaccagggtccaagagcaggtgcagccgagtccctagccccgggcgggcggtggggacgagtctctgcgcgaggccctagaagccccggatgtggcagtacgcctccaggctggcgaagaggatgtacaggagccagaggcccaggaagagcgcggtggtggcgagcttgggtccgcgcgggccgcccagctcgccgccgatgtgcggccggcgccggtacagcagcacggcaatgcccacgaaggcgaagacggtgaagagcgtgacggagaaggccagcgtgccagtgcgcacctcgaaggggcggccctgcaccgcccagtacacggcggccacagaccaggcgacgcccaggccaaggaacacgttcaccgcgttggagccggtcacgttgccgatggacgcgtcggcgcactggtcctgcagcgccgccaccttgctggcgaacgtgtctgcgaggcagagacatacaggtcggaggggctttgcgccgccacccacaggggcgggcatccgcctgccccctcccagcctttcccggtcgcctgctttctgcgggcagtgtgggctcaagacccctgacccccacccaagaggcaaagtccatcaccacctttaggcctgctcgccactggaaccgctgccggctttctatgggacctgccgcctgctttctgtgggattcattctcttctatgggactcactgcgtgatttctttttttttcctccgagacggagttttgctctgtcacccaggctggagtgcagtggcgtgatctcagctcactgcaacttccgcctcccaggttcaagcgattctcttgccggagcctctgagtagctgggattacaggcgcccaccacgccctgctaagattttgtgtttttagtagagacggggtttcaccatgttggccaggctggtctcgaactcctgatctgaggtgatccactcgcctcggtctcccaaagtgctgggattacaggtatgagccaccgcgcctagctgtattttttgtttgttttgttttgagacagggtcttgctctgttgcccaggctggagtacagtggtgcgatcatggctcactgcagcctcattttccccagctcaggtgatcctcccacctcagcctcccgagcagctgggatcacaggcatgcgccaccacgtccagctaatttttgtatattttgtagatacggggtttcaccatgttgcccaggctggtctcaaactcctgggcccaagcaatcctacccctgccttggccccccgcctttgcctcccaaagtgctggcgtgagccaccacaccccacctgccccctcatcttagttaaaactctgaggtttggccaggcgtggtggctcacgcctgtaatcccagcactttgggaggcagaggtgggcggatcacgaggtcaggagttcgagaccagcctggccaatatggtgaaaccccgtctctactaaaaacgtaaaaattagctggatgtggtggcgcacgcctgtagtctcagctgctcaggaggctgagacagaagaatcgcttgaacctgggaggcagaggttgcagtgagccgagatcacaagatcactgcactccagcctgggtgacagagcgagactctgtccccacaccaaaaaaaaaaaaaaaaaaaaaaacaaaacccaaaaaaaccaactttgaggttcactggcctggtttctgtcatgtcccccaacatagttccatggactcttctgtctggtttcttgcgggatgggacatcaacagcttgtttctatggaacccactgattggcttctctgacaatccccaccgtcttcctaggaacccctctccccacagctgtctcttccccaccctgccaccttctctctatgaaatccattgtctggtttctagcatttcctgctaccttagttttatgggaccttctacctgggtgcttttggggaggattcaattcacatcttgcacctaggggacccgctgcctggcttctattatgccccacctccgtatttctctgagacccaccacatgggcgctgtgtgactccacccacctcattttggcaggatcctgtgttgcccctgcctggctcatctgagatcctaccccaccaaagtctcccagggtgttaccagggatggaggtgcccagggcaacgaagacaacagcattgacagagtccttgaggccaacggtgcagccgaagtgggaggcgaggtccccaatgagggcggtgagcaggccgatgaccaggatggagacaccaaagcaggcccagccgtggcagtactcggtggggggcacacaggcgaagagcaccttccagaacaccgtcaggaagtgcatcacgtagtcaaagcacgacggcagccgctcctcccgggacccgtcctcctcctcctcctcgtcccctgtgggcacacgacccagctggggcatacactcagacttccttccttgcctacagaggccccattttgtctaacttcctgacagcaagtcccattgaatgaacttctttcccagaatcccttgcacctacctgtggccaagtcaactgctaaaaacagttactttcccagaatcccttgaagctaggagcttgattgggcccaggtgaaaaatatttactttcccagaatcctttggatctaaatatggctaagtcagcagtaaaaacagttacttccatagaatcccttggagctaggggcatgactgagtccaggtaaaaaaattttactttcccagaatcccttgcacctaagtgtggccatgtcagcagctaaaaacagttactttccctgcatcctttgaagctaggagtgtgaatgggcccaggtgacaaatatttattttcccagaatcccttgcacctaaatgtggccaagtcagcagctaaaacccattactttcccagaatcccttgaagctaggagcatgaatggacccaggtgaaaaatatttagtttcccggaactgcttgcacctaaatgtggccaagtcaatgctaaaaacagttactttcccagaatcccttgaagctagaggaagccacatctgcccagctaaaaacatccagttccccaagaccgtttgctgccagggacagccatacccctagctaaaattattcattttcccagaagccttcacagctgctgaaagccagtccacagctagaagtattcacttcctcagattcactgcagctaaccagagccacagtctccactaaatgtactcactttcccagaatcccttgcagctagagggctatatacccagccaaaattaatcactttcctagaatcccttgagactagcaacagctatggcctcagataaaaatatggtattcactttcccagaatcccttgcagttggcagttgccatgtccctggctaaatacttgttttgccagaattcctcctgtgagtgactatctgacccagtctgccaatgagatataaacagagggtttctggaaagccctggctttcctgatgtgggcattgggttacagatgtgttttctgagctttgtaaatgatgcctcatgcttagagctgtatcacctattgtgacctaatttgaccagcttttgacctgcagtgacttttttttttttttgagacagagcctccctccgttaccaaggcagtagtgtgatctcagcttactgtaacctccgcctcctgagttcgagtgattctcatgcctcagtctactgagtagctggaatcacaggtgtgcaccaccccacctggctgatttttttgtatttttactagagatgggatttcgccatgttggccaggctggtcttaaactcctggcctcaactgatctgccctcctaggcctcccaaagttttgggattacaggtgtcggccaccgtgcccagccgacctgcagtggcttttataacctgaaagccctaaggcagtgttttgtttacctcaccctaagctgattagtataaagcaatgaatgagaatcaatgagcacacttgtgtgtggcacgcattacatctggaaggatgctcatgagaacgaacgtagctcctgaccagtcactgctgaacgcatccctaactgatgtaagacatggctgaggtcagagcagggaggccacgctctttgggagagaggtggctgctattaccgcatcactatgtcagttgaggcttctgcctgccctgcttcaaatccttccttggttcttgtactaccttcaaacccaggcccacatgcctaggcttggcattctgcggactctggcctcagctgacttccccagctgctcccctctacagggaggctcgtggttatgcctgtcactctgaagtcacctctctggtgtccaaccctggatccactgtgtgatcctgaatcagtgtcctcacctctctgggcttctgggtgcctatctgtgataaataattggacctgcttcatgggaaacttgtgatgacagaatgagttggttcatgtaaagtgctgtcaacggtctcggacacctccagcgttattactgttgtttcgattgttatgattgaaggccttttttggtgcctgggggaaattcaaagatgctccatgccaagtccagcccacaaggagcttacagtaggaagggaggtaaaggaagtacaaaagctctgcgacaagatgggacccgactcatctcctaagggagtgaggactacccttctccctcacccctccagcagctctgtgctcgcacagcaaagaaccaaaaggcacgtgctgaacaaagtgcaaagtgaccaagctctgatccagacactgaggatacattaattaaaatgagttcacacaggaaataaatttccaaccatgcctggcactcaagacacgatagggtcagctgggcacagtagcttacacctgtaatcccagcactttgggaggcggatgtgggcagatcacttgaggtcaggagttcaagaccagtccggccaacatggtgaaatcccatctctactaaaaatacaaaacttagccagacatggtggtgggtgcctgtaatcccagctactcaggaggctgagtcaggaggatcgcttgaacccaggaggaggaggctgaggaggctgcagtgagccgagatcacaccactacactccagcctggatgacagagactacatatctcaaaaaaaaaagacatgatagggtcaccgttgtcataatcaggattattattacagttattattattgttatgttgttattcttcctccaccccgatctaatcacctgatctaaccacctggtttctataaacccacagcacgatgtacgctgggtctctacgaccgccacctcccacctcgtttcagttccgcctcatcctccgtctccactaagtccccagaggaaggaaatgctccgaagctcaaagagccccttgccatctccccgttgttcgtggaatgaacctcaaaggagcctctgcagggcccgtctcctgctagtttcttttcttcgtttttttttttttttttagacggagtttcgctttgttgcccaggctggagtgcaatggtgctatctcggctcaccgcaacctctgcctcccaggttcaagcgattctcctgcctcagcctcctgagtacctaggattacaggcgcaggccaccatgcccggctaattttgtatttttagtagagacggggtttctccatgttggtcaggctggtctcgaactcctgacctcaggtgatccacctgcctcggcctcccaaagtgctaggattacaggcgtgagccaccgcacccagcctctactgctagtttctacagcctctacccacaccctctccactttcctcccacaagctctctctagccccaggggcttcccccattcaaaaccctccatggctccccagtgtgttcaaatgccacccaagctccctactgtggtccacaaggagcagtgtagaaatgtgccgatttccagcctcatcctggtacctcttcctcccgcccaacaccaggcacccacccaaaaaatgtgccataatctcgcacactccagggcttctgtgcttggctctccctctgcctgaaacactctccctgtcttctccctcctcctggctgacatctttacccatttgaagactcagctgggaagccaccccctccaggaagccctccctgactttcaggctgggttaggaaccgcatcagggctttcctccgggtctcccatcccagccctgcctactctgggttgtctgtgtcttgtgacatgtctgtctcctgcactgggctgtaagctccatgacagggccagaaatcacttctgtgtccctggcaatgtctcacatagggtcgggcccagaagatccctcagaagtatgtcagaagaatgtggcttcagagggagatgccactttgtttctactgggcaaacagtctggtgtttctaggactgctgccttgtattttcccatccccttaagcctggtttctttggatcctgctcgcccagtttctttgcaaccacaattccatgtacgccttcagtccccaagagctggggccttaaccctgatgttatgtaagagattgaagccctgagctccgacctcgggccttttctggactccctgtgggacttcaggccactccctcctctgtctctgagcctcagtctccccagtccatatcacaaagggccagtgttggcttccaagaccgtcagtgggtacaagtgtcgtagtgtctctagccacaagggggcagtgtgggcctgtctgaggccaaggagggtggtgacccgcgcaggtaggaaagagctcggtgccctggtgactgtctccagggcaacggaggaacccaggctctctctggggtggccacaccatttaatctgttcccaccctcctgatgcctgatgctgggagaaagcccaggctgggaaccctcccggttcagcccagagccaaacacaaaccctcccagccgctccagccaccacctctcccttctctgccctttctgtatcctcatctacctgcctctccctctccccggcccatttcagtttgcaccgttcattctgtctcatgtcttctccatgtctctctgattctccctgtgtatttctgtgtgtctctctctcctgcttgtattttttttagagacagcgtcttgctctgttgcccaggctggagtgcagaggcacgatcatggctcattgcagcctcaaactcctggcctcaagcaatcctcccgcctcaccctcccaaagcgccaggattccaggcatgagccaccgcgcccggcctgtttatctttgtgcctgtctctccattcatttctccccctttccctgtgtctctgtctctccatctttctctcttctctctcctccctccccacttacctgcgctcaccgtaattgcctctaaaaactgctccctccatgaatgggtcccaattaccaaggccaagttcgttttcttgatgagtttatccaccgtgttctggggatgagagggtgggggagaggtcactgcccctgagcgaaccagggaagctccatgttgggtcctgggtcgggggctcacagcctgtgcccaggggtcctcaactttccacacccccgttctgaaggcaagcaaggaaaagggaggcatgtgctgtccgtggtcctgacgtgggacccttctttggcttgatcttaggaaccttgtggctccccgctttccggaccctccccaaggaaatgaaccaggctggactccaggaaggtgaggccccggaaaatcaccttaaaatcatatgactcctcgatgatgacctccagccggcagttctccccaagaactggcttgcccatctctgctatcctccgagcctcctcctcctcggctgttagcttcctgtccccatcccctgcagcatgaggggtgggggttagactcctgggagacctacctaattgggcctgtgacgcctttactacctgtccccatagttagagaaagcctatctgttctcctctgggaagctccttggtgactcctcccagcctcccacctgaccaccgtctccttcaaccctgaggtccagctcccaagggttggttcatgatctttagttggtgggctctggggttcgtatggtggaggctgtgagactttaggcaatacctgagcctctctgtgccttagttttcataactgttaaacgggcacaataattagtacctacctcatggggtggttgtgagacttaaatgagttaattcgtgtgaagtgcttagaacagtgcctggcacacaataaatattcaatacatgttactatctttattattatcaccaacattatcatcatcgttgccaccctgataggggaggcctggtctctacatccagtttctggaaacatcctagagtgtggctgacatggtaaggaaaggggaggacatccgattttggcacaaatcttggaaccagacccacctacatcctggtcctgagctcgcttctctccccaaagtatgctgacccctgactccaagcccagcagcagcccaaccctaattctggtccctaactctgagctggactctcactgtggccccaaatggaagcctgtcatcaacactgactccaaaccccaaccctcagccctggatctgacctcagcacaaccctagccctaaaccctaatcccgactctaacattcaccataacctggagcatcaataaccccaagccaaatcccacactctatctccagatctaactccagtcctacacctgacctcaaacctcagtcccaactcccaactctgacaccatcactcatgaggagcttgaccacacggcagaagctgaagtgtgttcacctgaacctgtttcctctccttcctgggcaaagagctgaactacatttcccagcctcccttgcagctgggcgtggccacggcctgagttatggacactagaatgtgggcagaagtgatggtcagtccctccaggcttagcccccgaaaacctcccatgtgagcctcgaaactctcttgccctgttcaccagcagcaaacccagccacaatgccaaagctccctggcacagtggagtcacaagatggaatggccacatggcagaagaaagccacccaccaactaggaacactctcgtaaaactttgcctgagaggccaggtacagtggctcatgtctgtaatcccagcactttaggaggccaaggcaggtggatcacctgaggtcaggagttcgagaccagcctggccaacatggtgaaaccccatctctactaaaaaatacaaaaaaaattagctaggtgtggtggcaggtgcctgtaatcccagctactcgggaggctgaggcaggagaatctcttgaaccccggggggtggaggttgccatgagccgagatcgcaccattgcactctagcttgggcaacgagagcaaaactccgtctcacaaagacaaacaaagaaacaaaaaacaactttgcctgagcaagaaataactttttttctctcttctccctccttccttcctttcttccttccttccttccttccttcctcccctccctccctctctctctctctttcttacttttctgagatggagtctcgctctgtcacccaggctggagtgcagtggcacgatctcggctcactgcaacctccactttccaggatcaagtgattctcctgccttaggctcctgagtaggtgggatcacaggtgcccaccaccatgcccggctaatttttgtatttttagtagagacagggtttcaccatgttggttaggctggtcttgaactcctgaccttaagtgatccgcccgcctgggcctctcaaagtgctgggattacagacatgaggcattgtgcccagtaaagaaataacttttattgtgttaagcccctgtgacttgtcggtcagtttgttatagcagcttgtattgcttcctccaacgaatacaatctttaatctaactctaatcctaaccacggatcccaattctgatcttgactccaaaatgactttgtccatctccaagccactgaccttagccctaactcttactccaatctctgaccttggccccaattctaacctaaattcctcaaactctattactcacctcaaagtccaactttagctttgacctaaatctgactctaattctaatctgatcccaccagcaggaaagcacctccactgtgactctcaccttaacatggtcctaaccccgatctccaatccaaaccccacctcactcctaatcaaccccaaactggattctctctgacctcactctcacaaacccagatctgattgtatgacttacaaccctgattacagacataatcttttgagatggagtcttgctctgttgcccaggctggagtgcagtggcaccatcttggctcattgcaacctctgcctcccgggttcaagcgattctcctgcctcagcctcccaagcagctgggattccagatgcctgtcatcacactcagctaatttttttttttatttgaggcagagtttcgttcttgttccccagcgtggagtgcaatggcgcgatctcggctcaccgcaacctccacctcccgggttcgagcgattctcctgcctcagcctcctgagtagctggaattacagttgtgtgccatcaggcccggctaattttgtatttttaatagagacggagtttcaccatgttggtcaggctgctctctaactcctgacctccggtgatccactctcctcggcctcccaaagtgctgggattataggtgtgagccaccgcacctggcctcacccaggtaatttttgtatctttacaagagatggggtttcaccatgttacagacataatcttgacctccaaaatgctaactgtaatcccaaactcatacaggcaccaccaactctcaggccagaccccactgtcccccagccctgaatctgcctttatctcacctccaatctgcctcaaacccaacctggaagagtagctttggggctgggaccctcccccaggccctcttccagtggctcctccccactcagagcccagaggtgacttcactcaccttgattgagtagcagagctggggagagacagagacaggcagacagtgagatcagttccccacgaagctcaggtccacgagctttaaggagtgcctgcaattgagcccctgaaagtcccccgaccctggaccccttacttctcccacagcccactggtcacccctcacctgaaatccctcgcttaagccactggggctggcccagctcaatgaagaaattatcctttttctcatattcctcgtcatcaactatcttcacctgaagagttttcctgtgcagggggtaagggggaggcagaacactcagtgtaaggccccctccccagactcaccaggcaaccctcctggcagccacccagttttccaagcacctcctctgtcccagactccacaatctcatttacttctcaccaccacgcagggaggaaggctctattatcatccccatttgacagaaacaaaaccaggcactggtgaggaagctgagtctgattaaagtaaagcattctgggtgcggtggctcatgcctcttatcccagaactttaggaggctgaggagggagggttgcttgaggccaggagttcaagaccagcctgggcaatatattgagagcccatctctatttatattaaataatttattttaaaaaataggccgggcacggtggctcacgcctgtaatcccagcactttgggaggccgaggcgggcggatcacgaggtcaagagattgagaccatcctgtccaacatggtgaaactctgtctctactaaaaatacaaaaattagctgggtgtggtggcacatgcctgtagtcccagctacctgggaggctgaggcaggagaattgcttgaacctgggaggtggaggttgcagtgagctgagatcatgccactgcactccagcctggcaacagagcgagacaccatctcaaaaaataataataataaaaaaataaagcaaagcggtatgagctcatggttgagacaggatttgaacttacaactgtcagaatccagactgttaacccctgcactccagcccagccactatggtctcctacctagattactagttgcctgctaaacaatcccatgcttcagcctcaccgcccacagtctgttccttcaagagcagccagagtgatcctgatagaaccaaagtcagaccgcattcctcccctgtgcaaaacatttgcaaggctcctatctctcacagaatgaaagtcaaagtccttaggatggcccacaagaccccctgcaatctagcactcattccctttctggcctccttgctattccttgaacaagccaggcctgctcatgcctcagggcttttgcactggctgttccctctgcctagaacactcttcccccaggctcccttcctcagttcttcattcaaacttcaccttctcaatggggcccacttcttccatcttatttaatagtgaaatccctcactgctccccctccagcactcccttatactgctctgttgtctttctttttaatgtatttattattatttttggagacaagatcttgctgtgtcacccaggttggagtgcagtggtgcaatcatagctcaatgcagcctcaaagtcctgggatcaagcgatcctcctgcctcagcctctcatgtagctgggactacaggtatacactaccatgctcagttaattttttattttttgtagagatggggtctcaccacattgcccaggctggtcttgaactcctgccctcaagtgatcctcccatcttggcctcccaaagtgctgggattacagatgtgagccatggcacctggcctgtcttctttaaatatcaccttctaacaccctctaacatttatttagtttattgttcgtcatttaccatttgcttccccatctttaaatttaagttcccccaggtaagttcatttatgttttttgttttatctccaacacccagaacagtccctggcatagagcacaccctccatgcatattttgctaactccaatccttcagcacagaaaaccctcagcttcctgctctctgtcccaaccagatctggagagttaaccaagtgctgatgctaactgattttctcagcatctctgctcctatggtaaccagggggtggcaggaaacagccagaagttacctgtcaccttcaggcacataatccacacccctcgaccccaaagacccacaaacccagaatgcccacagctttgccactggcaactctttaggctgtaggaaccatgtagtcccacaaggcctggccccagaacccaaaaacacaaacacccagcccacacagtcacccaatcgaggaagcacagccgatcacaccgcccacacccacacgccatcacaccctacagccattcccactgcagtggcaagactgcatggaccagatgcccgtcagttagcacgactcccccaccacagccttggcgacatcgccaccctgcagcccctcactgtggtaccacgtagacgctcctaccttatatctaactcctgacgcctcttggtgtctctgtttacttccttcagtgcctctctgcatctctgtccctacattttccatcttcttttctctctctgcctctctcagcttctctgggtctatctctccatctctgactctgtctctctgactctccagcagtctctctctctgactctgactctctccgttctctgtctcagtctcttctcatctctctgctctccctttttttgaaacaaagtctcgctctgttgcccaggctggagtgcagtggcataatcatggctcactgcagccttgatctccagggctcaagcaatcctcccacctcagcctcctaagtagctggaaatataagcgtgtgccaccacacctggctacttttaaattttttatagagacaggatctcactatgttgcccaggctggtcttgaattcctggcctcaagtgatcctcccaccttggcctccccagtgctggggttacaggtgtgagccacagcacctggcccgcccttctttatctggattcttctctccctgtctctgtctttcagagtctaaagaatggagtaacaaaagtcaacacacttcaagcagaagagtttcaatcaggcagtcattcaaaagacgcatctcaacacacaaacacgcacaagacacagcgacacccgcgcaaggacaggcgcacacaagacggccatgtggggacatccgcccacctccaccctcctggtttcaggatattttcaattttctgtgggtggaaagaaagggccgcccccgacctcggcgtgggctgtgagctgtccgcggtgctgaaatgctggggccggcgaggagggagggtctcccgagacatgctcctcacacaccctgacacacacagacagctgccgacacagtgacatgctgacagggtgacacacacacctctgtcgctcactctcgcagacatgctgcgatccgctgacacacagtgactgacgtgcagtgacaggcacgtcaactgcgcctggcaggcgcaccctcaggggacccaaatgcaggagaaacccaacgcgcaggaaacagcaagagggactcgagctagaccaagacaggacttcctgagatcaaaggaagcagatttcctccccagcctgcccccttgtttcctgaaaactccactctcctgcccttctcccctgccagtctctgatctcagacccagtctcctcatcctgtctctcactgacccaaactcccttttctctctgcagcatcgtgagaacctctccttccctgggtcagtctctctcctccatgaatgtctttatcgcgtctccatctctctgcctttcagtctccctccatctcagctttcaatatccacctctctccctccctcaaagcatctctgtctctgtgtctcttcctttttttcgggggtggggtgggtgggagatggagtttcgctcttgttgcccaggccagagtgcaatggcgtgacctcggctcacagcaaccttcgcctgctgggttcaagcgattctcctgtctcagcctcccgagtagctgggattacaggtgcatgccaccaggcctggctaatttttgtatttttagtagagacggggtttcatcatattggtcaggctggtctcgaactcctgacctcagatgatccacccgtgttggcctcccaaagtgctgagattacaggcatgagccaccgtgcccgacctctaagttcctgtctttctgtgtctctgtctctctgttctgtctctgtttctctctccagttctgttattctgtcttcagctctccctgtgtctatctctgtgtctctgtctctgtctctcatgctctccctgccaccccatctctgggtgtctctcctccatctccagcccagctgcttcaaagcgcctctaattagtgcctgcccatcagaggaaggaagagtttccctaaacactaattagcctcctgttctctgtcttctgaagccacagctgggagcttgtgggggtgggggacagagggtgtcccagcctggggaagccatgtgggggaggacagggccgtaaggttgcagcagcaggagggaagcaggttggactataagaaggaccggaaaaagcagaaagaaaactctccattcccccatctcttggtgtgagagaggggtctgggatggtgcctctcgcagcccccaacccaagttctcaacaaccctcagacagagaccaagccagacagagagagagaaggaaaggtgtggagtgtgcctgaaatataagctgagtcagagagcgaggtgctggggacagacagctgcagatgaacagagacgcagagacccagagagagacagcccagggagtgagagatgcagagatgcagagggagagacggagagacagcgagagcagtgagaagctgagtgctgcccgaggcggaagcgcagaggctgggaggaggagggagggggagcgcggtggggactccgcttgagtaggaggcgcgtgggcggcacggaggagggagacagacgggcatgcgggggcggaagagagcgggcagaggaggggcaggcgctgcctgcatcctgggcaggggggtgggggaatgtgaggcttcaggcacacattgggggacactcggtcacctgtgtaaggggtggccagggatctgggcgtgagaacagccctgacttaataatttagtgtacgtgtccgtgattttatgtgtgtctgcgtgttttttttctttttttgagacagggtctcactgtgtcgcccaggctggagtgcagtgggtgatcacagctcactacagcacctaactcgtgggctcaagccatcttcctgctttggcttcccaagtagctgggactacaagtgcacaccaccatgcccagctaattttaaacaatttttagcagagtagaggctgatctccaactccaaggctcatgccatcctcccgcctcagtttcctaaagtgctggcactacagacatgcgccaccactaattagaaaaattatttttagagtaggagtcttgctatgttgcccaggttgctctcaaactcctggcctcaaatgatcctcctgcttcgtcctcccaaagcgctgggattacaggtgttgaccaccacgcctggccctgccgtgtgtgtctatgtgtgtgtggtgcgtataaatggctttgtgtccaatctgtaaacgtctgtctacatgtgtgtgtctgagtgtatccagccagcccacctccccagaccccattttcctaaatcccagccctcaggctccccagtgtctccccaggccctgccctgccttcccaggcccccagattccagcaccatcttttcccaaatcctcgcccagattcgcgttaggtgccccgctatttccccaggttcttcctcatacccagaagccccaccccttccctagctccgcgcgcccaggccccacccatcttgttaggccccgccttcttccgcagcccacatccattttcccatttcctgatgtcgtatgtccaaacccagaccccacctatcgccctggacccgccccctctccacagccaccgacagcgtctcatctccacaagcctctccccacatctccctgggtactcttcagcacacactccacgagctaccaattaaggccccacaccgctctccccaggccccgtcccatctctcctcacctcgtccccccttcctccttggggccctcttctcacctgtccggccacccttctaggcctcgcctcttcatttcacagtcacaaccccaccaggccccgcccacgtggtagacacagcacacctaggccccgcccctcccgaggccaagcccactttggagaacgattcactcaggcccctctcctcctgagggcccagctgttcagtgaagccccgcccacgtcgtgggcatgggtcacaggccccgcccacgttgcgggcacggccacgcaggcccctcccctcccgaggcccaaccaagacccgcccactatgtgggcatggctcacccaggccccgcccctgagccacatcaggcctcgcccattccgaagccccgcccctctccgggccgcctcgggcgtgctcacatggtctcgtcgtcgccaaactccagctctccgcacgcgtcctcgtagtgcacgccgccgccgcgcgccgtgccgtccaccgtgcggtagggaaggcgcacggtgccgcgcgcgcccgagctgcgcacgacgcgcacgtccacggtgcccatgcactcgctcacgtgcagcaggcggtcctggaaggagaagatgcctgcgtggtcgtcgtccaggatggtgacggtggccagcagcggcgccaccagccgccccttgggccgcccgccgccgtccggctcgaacatgccctgcgcgtcgcccacgcgcaggttcagcagccgcacgaagaaatgctcgtcctcctcgaagatgtcgtcgtcgatgatgccgatgcgcagctccttctgcgtctcgcctggtttgaacaccagcgtgccctcgctgcggcggggtggggagggggaagagcggggtgagggtcggtcatcggctgtgtgttgtacggggggagtctggacgtgcttcccagaggagacgtaggtgccatagaagaactcccaagtatgagggtcgacaggcattaaacaagtaatactgagggtgaatcggggtgggcgtcctggaggaagggctgcagagcgggaacaagacagagtgggcccctccccgcgtggaactcgtgaagagcagaaggtgggaattaaacaggtaatgataaggttgagatcagggcaggcttcctggaggaggcattagcaggtgggcatactccaggcagaaggaacagcacatgcaaagtccaagagttgagagggagcctggggtgttctacatccctgcttctcaaaccttaatatgcatatgaatcccctggtggagcttgtgaaaatgcagattctggtttagaagctcccgggtttctagaatcgcatttctaacgagctccaggggatgtcctggtcacattttaagtggcagggatataggacccagaaaggactctgtcattcctctgataaaaacccttcccagatgcccccaagaggaagtccatacaccttaacttggcatcactcattcattcaacaaacactcctaagggcacccgttgtgtgccttgtgccgagtggtgctggggacacagcagtaaccaggccctgtcctcacagggttcacagccccatgggagagccatatcaccatgacaattgcacatttaatgatttaattacggttcattcattcaacagataactgaccgttgtgtgccaggcattgttttaagtgttgggggaacggcaccaataagaagctttgagattctgttttagtgcagaagaatgaacaataaacaaacacaggatgtcaggtggtgatggtgctatggagagaaacaggagggtagggagtgaggagagggagctgttggcatggtcaagaaagccttttggaggaggtaacatttgagcagagacctgaaggaggggagggagtgagccatagggaggatgcctggaaaagagttttttgttgtgttttgttttgtttttttgagacagagtctcgctgtcatccagactggagtgcagtgtctccatcttggctcactgcaacctcccctcccgggttcaagggattctcccacctcagcctcccgagcagctgggactacaggcgcctgccaccatgcctggctaattttgtgtacttttttgtagagacagggtttcatcatgttggccaggccggtctcgaactcctgacctcaaaagatccgcctgtcttggcttcccaaagtgctgggattacaggcgtgagcaaccgtgcctggccaaaaagagtatttttggtaaagggaacaggcaatgtgaatgctctgacctgggactggacagccggacaggggacaggatctgacttagggacgggtcacctcttcgaggaactgcagggagaccagcatgatgacagcagagggagccaggacgagagggtggaagatgacatcacagtgggaacgggggcagatcacctagggcctgggtgggccacggtgaagacttctgcgtttaccctgagtgaggaaggagccctgtgaagcttcgttccgagcagaggagggacacgagctggcttggtgttaaaagagtaacagttgtggaaatctctgaaacacccataagatactctgtaatggggggagccggggagggaacaaggcagtgacattagattactcagagtgaaattctgaggggtcatggagtaagtggactcttcctggcagggctgcagacatcagcgtgactctgggatattaagaaatcttgaaaatctatcatttcccccaatccctcctactgtgcatgtaaggggctcagcaccatctctgaaccctgctatgtgatccatatgcattcactatcactttcatattaaaggggttctggggccgggcgcggtggctcacgcctgtaataccaacactttgggaggctgaagtgaatggatgacttgaggtcaggagttcaagaccagcctggccaacacagtgaaaacccgtttctactaaaaatacaaaaattagtggggtgtagcagcgcatgcctgtagtcccagctactctggaggctgaggcatgagaattgtttgaactggggaggtggaggttgcagtgagccaagatcacgtcactgcactccagtctgggtgacagagcaagactccgtctcaaaaaggtgggggcggggagtcaggctccagttttccagctctgtgggaggaagagagggaccgcaaggttctggcaagaggtagggggcatagaacctggtgaaaagacctgcagtggagggatgagggagtccctcagctcaggattcactgtccgtggtgatggagcacccaggagggtgggctgacctgcttcaagcccagtttggccaccatgccagctgtgtgatcttgggcggtcaggattctgcagtcctctgagccttggtttccttatctgtggaatgggctaataatagtgtttacctcctggcgctgtggtgaggactgaattgatacaggggaagcacccagaggcacagttagctagtgatatccacatattaatatcataatcttagagtcctaaaagtcatgggatatgagacatttacatgtaagggataaagggatcagtaaaatatggagattgtagcactatctttttttttttttttttttttttgagacggagtcaccctgtcgcccaggctggagtgcagtggcacgatctcagctcactgcaacctccgcctcttgggttcaggcgattcttctgcctcagccttccaagtagctgggattacagatgtgtgccaccatgcctggctaattttttgtatctttagtagagatggggtttcaccatgttggccaggctggtctcaaactcctgacctcgtgatctgccagcctcggcctcccaaagtgctgggattacaggcataagccaccgcgcccagaccttttttttgtttttgtttgagacagggtcttgttctgtcatccaagctggagtgcagttgcacaatcccagctcactgcagcctcgacttcctgggcttaagcagccctcctgcctcagcctctcgagcagctgggactacaggctcgtgccaccacatctggctaatttttatacttttggtagacatggggttttgccatgttgcccaggctggtcttgaactcctgggctcaagcaatccgctggccttgggctcccaaagtgctgggattgcaggcatgatccactgcatacatcctgtagcatcatctttgccaaacaattaatccaaagatttagcaacatctttaccaaacaattaaactgggcatcacagtaatggacgagtggacatcatgttcctcctgatacaatgcacccagggggatagagcatcgcttgcatgggattcctgccaaaagtgcaggactccaatcatcaggaagcattagacaaacccagattgagaatcattctagtaactggcctatcatcttcaaaagcatcaggtcacaaaagtcatgggaaggctgagaaactgatccagactgaaggagactaaagagatttgacagggaaatgcaatgtgtggttctggatcaaatgggaagagagggcaggagtgaaaatacagccatcaaggatattacagggatgactggggaaatggaaacacgggctgtgcatcactcaattgacgttgagttaacagtatcaattcagtgttagatttcttgagtgagatcatagtattgtgattaggtaggagaatgccattattctcaaaagatgcatgctcaagtatttaggcatgaaggtcatggtatttgcaactcgtggtcacagagtgtcacaattattgttattattttattattattttgagacagattctggctctgtcatccaggctggagtgcagtggcacaatcttggctcactgcaacctctgcctcctgggctcaagcgattcccctacctctgccttctgagtagcagcgactacaggcacatgttaccatgcccagcttatatatatatatatatggagagagagagagagagagagagagagagagagagagagagagagagagtgtgtgtgtgtgtgtgtgtgtgtgtgtgtgtgtgtgtgtgtgtgtcttggtctgtctcccaggctggaatgcagtggcgcgatcttggctcactgcaacctctgactcctgggttcaagcaattctcctgcctcagcctcccaagtagctgggattggactttagaagccaggcatcagaatcatagaaggctagattcacaggacttatgtttcagcactggacacagaatctgagaagataaaaatcttaaagccatcaagtcagagactggatagggtttggattagaataccaaaatgttggctggtcgtggtagctcatgcctgtaatcccggcactttgggaggccggggtggatgggtcacctgaggtcaggagtttgagaccagcctggccaacatggtgaaaccccatctctactaaaaatacaaaaattaaccaggtgtggcggtgcacacctgtaatcccagctactcaagacgctgaggcatgagaatcacttgaacgcgggaggcagaggttgcagtgagccgagatcgtgccactgcactccagcctggtcaacagagtgagatgcagtctcaaaaaaataaagaatatcaaaatgttagaattctagaatcttagaacttcagacccttagtgtgtcaacatcataggggattaaatctcagaatcttggaaaaactgtgctgtttagggttctcagagatcacgtttagtttggagaaactaaggctcacaggtgtgaacctgtgggaaacttagaaaaagaaaaaggctttccttcttcaagacacttatttccataagtcagaaaactcttataatagaaatgcaaatctacaatgtccactatgaagagagcttcctcagatatggtggttttatgcagtgcacagcttcaacaactgtacatggcagacctgcctgctcagactgaggcaggaacttgcccaaggaacagggtccagggctaagctcggagtggaacccaagtctccttcctcccagtctttggcctaaggtaccttgataaggcaatgccaggcctcgaatgtcttccaggataggaaatcaaggaaggataggaagatgttgactcttcttagccctttggttccagcactgaacagcatttcctccttcacttcaaacatcttggtcctggccaggtgcagtggctcacacctgtaatcccagcattttgggaggctaaggcaggtggattgcttgagcccaggagttaaagaccagcctagacaacatggtgaaaccttgtctctacaaaacataccaaaacaacaacaacaacaacaaaaacaattagccaggcttggtggcatgtgcctgtagtcccagctatattggaggctgaggtgggaggattgcttgagcttgggaggcggaggctgcagtgagccatgattgcgccactgtgctccagcgtgagtgacagagtgagactctgtctcagacaaaacaaaacaaaaccacaccagcctgggcaacatggcaaaaacccatctttacaaaaaatatataaattagctgggcgctgtggtgcacacctgtagtcccagctacctgggaggctgagatgggaggatcacttgagtccaggaggttgaggctgcagtgagctgtgattgtgccactgcactccagtctgggtgatagagcaagaccctgtctcaaaaaacaataaaaaacaatcttggtcctgaggtcatttgtaagtgacaaagtgggctgttatcccaggaggtgacacctgtactcacttccttctgcaaagcctcagggctctagatggggacagtgcggaccaggggtgggtaggagtggaaaggtgaaaagatagttgaaagcaggccccaatatggtgaatgcagttccctcaactgagggcatgtggatgatatggtgcactgggagaggatggaccgagtggccaaagggatcccatgctgcagggtgatggaacaaagacctgtgaacagctgcattttgttttgttttgtttgagacagtgtctcactctgtcactcaggctggagcacagcacaccatgcacctgtagtcccagctactttggaggctgaggtgggaggatcagtttagcccaggaggtggaggctgcagtaagccaggaaggctggggtgggcagggtaggaaaggtggatggagatgggcagacaaaaggatcctggactgactgaggtggagggaaagacctgcaaatgtccaagcgctggaaagagaagtgatgagggcagagagggaagaagactggctacaaaaagcagccaggcacacagtggtggaactcaagatcgatgaaacagagaactgccaggtgcggtggctcacgcctgtagtcccagcactttgggaggccgaggcgggtggatcacctgaggtcaggagttcaagaccagcctggccaacacgatgaaaccccatctctactaaaaatacaaaagattagctgggtgtggtggtgggcacctgtaatcccagctacttggaaggctgaggcaggagaatcatttgaacctggaaggtgaaggttgcagtgagccgagatcgtaccactgtactccagtctgggcaacaagtgcgaaactctgagaaaaagaagaaaggaagagaggagaggagagagtagaggagagagaggagagaggggagagaagaggtgagaggagaggagagaagatgagcgaactgagtcccaggaagagaagggttaaagggatgagggattggctgctgcttgatggcagaaccaaagatctgggaacagttcagcctcagctgtaccccagggagaagattaaagggggatgtgtcaggctactgagcaggtagaacctctgaaaagctcagccattggccctctttctccctgtctcctgatttatttttcttcacagctcctaccactacctggcatttttatgtaatcagtgtttacttcctaactgcctgtctttcccaggagaatgtcagctccatttgggccgggactttatgagttttgttcaccactagtcgccggtgccagatctgtttgtttcttgcacatagtagacacatgataaatgtcattatgggaaaggggagacttgtgcatgaattaacaacacatactgttcaaagcatgatgtaggctggtgaaaatcattgaaaagaacatactgtaaagctataagtcttaaaatagtgtgtcatggacagaagaactacaaatagatgaattttgtgggccacatgaggacagagatcttatctatcttggttattgttctaggttgatcccctaaataaagacatctggcacacagtaggtgctcaggaggaactgttgaatgagagaatatcacagatttgcaaggagaggggtaaggagagggactggggctgtgagatatggtagagggtgatgggtgggttgctttatggcacaaccaaagacctttagccatcgtctctctcctccactcctattttattttcctccatagcacttattgccacttcaagtttttatatgtttagtagtttatatcctcattgcaatttgagggcagggaccttagctgcttgttcccatggtacacccattggcatacagtgcatgctcaataagcatttttactttagtaatggtgggagaaggcttgttctaccaggtagcaatacacataatggagctataataattaaaacagtgtggcaccagcacaaaaccacagaaatataaagaatgcaggaggagtggtgtgaagactgagagtttgtctcattcatcatgtgcactgaatgcctggaggcagcacctggcacatggtaggtgcccactaaacattaatgttcctatgcacatgaggagacagctgttttaccagacaataaaacacagaacatggccggatgatggctcatgcttgtaatcccagcattctgggaggccgaggcaggtggatcacttgaggccaggagttcaagaccagcctggccaacgtggtgaaaccccatctctctactaaaagtacaaaaataagccgggtgtggtggcacacacctataatcccagcaactcaagaggctgaggcacgagaatcgcttgaacctggaaggcagaggttgcagtgagcggagatcttgccactcactccagcctgggcagcatagtgagactctatctcaaacaaacaaaaacccagaggtagataatgaaggcgggaggtgtagccttcggatagccatgctctctgcctggcccagaggtgtgtgccccacgtctagagcagcgcctggcacaaagcaggctctcaggaatgaatgaatgaacaaatgaaccaatgaatcctgcaggagtcagttgggaggcgaagagcctggaggccgccggacggcgggacccacggcctgcgccagccccctgcacaccccccaccccgggggacccacctgtactcgtagtcggagcccgccttggcagagccgtcctcagtgcggtagtccacgtagaaggtgctgttgccctcgccgccctggcacgtgacggacagcagcacggagccgcagttctccaggcagtggtagaggctaggctcgaagaagatgcggctggcgccgtcgtcttcgtcctcgcccgcgccctcggccggcgccgccctgcgcgaggcgtccgccgcgtgtctgcgcagcacgttcccggcgccggtcatcagccgcgtggcctggatgcggtagaaggcgcggctcttctgctggtgcagcagcgcgtagtagttggcgatgcccaccagctgctccagatccttgtccgggtgcttctgcttgaggtccttgaggatctggatgacctcgcggcggctggcgtccagctcgcgcgcctcggcggggcccgggcccaggccgcccagctcacctggggcctcggcgcccacgaacgtgccgtccagctcgatgctcttcggggggtcgccctcggcgcctatgatgatgccgctgcgtgggtcggtgcggtagcgcttgtacacgtacttgtagaagagcagccgcttgtcggccatccaggcgaataccacgcacaccgggaagaagaccagggtcagcagcgcctcccacacctgcgggcggcgggcgtcagggcgaggccgggcgggccgccttctccctccccgcctctctgtctcagtctctgtccgcctctgccactcctcatctctctccccaacccccaaccccgccccgtcgtctctccctatccctttctgtttcttttctttctttctttctttcctttctttctttttcttttcttttcttttctcttccttcctttcttccttctttctctctctctttctttctttctttttttttttatttgagacagagtctttctctgtagcccaggctggagtgcagtggtgcagcctcggctcactaaaccttgaaccttggcctcccgggtcccggttcaagcagttttcctgcctcagcctcccgagtagctgggattacaggcatgcgccaccatggccagctaagttttgtattttttttagtagagacgggggttcaccatgttggccagcctggtcttgaaatcctgaccttgtgatcctcccacctcgagctcccaaagtgctgggattacaggcgtgagccctgtctctttgttcatctctgcctctccccatctctctctcctccccactccccgtctctccccacctctttctgactgttcatctctgcctccccccatgtctctctcccctctcccccaagttctgttccccccatttctctctctccctcttctttccccatctctctccatctcaatctctgttcatctctgcctctccctgtctctctttcctcccctctccccgtctctccccacctctttctgtctctcttcatgtctgcctttccccatctctctcccccgagttctccgtttccccccatttctctctttccctctccatcttgttctgtctctgttcatctctgcctctcccccacttctctcctcctcatttctctctcctttccgtccctctcttagtttctctcaacctccctcttgtctctgttcatctctgcctctccccatctctctccccccatttctctctctccttccccccatctctttctatctctgtccctccctttttgtctctgtttggctcttgcctctccccatgtctggacgtgtctccatgtcctgttatatcctggtagatctccatctccctcccttgtgagtttctttctttttctctctcaatacctgtgtttctccagagctaattttttcccctctcccgtcaccgtttctctctctcctttcccttgtccttctcttagtttctatttccctcttgtctctgttcacctctctctccccatctctctctctcctttctcccacccctttccatcttgttctgtctgttcgccccctctgtctctgtctctgctcatctctgcctctccctatctctccccacccccttttctctctctctccttgctcccgttcctctccatctctgtctctctgttcctcacttattctctatttccctctcatctctgttcacctctgcctctccccatctctctccctccccttcctcccatctctttttaactctgtcctccctttttgtctgtggcctctccccatctcccccacatttctctctctccatctcgttctctctctctctgtccctgttcgtctctgcctctctccatcgctctctgcgtgtgctgctgtctctttccctccttgcctctgtctcagcggttttcttagcctttcctcctcctctgtctctctccctggctccctctcttttcttgttgcctcggtctccttggctccatctccttcttttgtatctattggtagatatctatttccctcccttgtgagtttctttctctttctcagtatctgtgtttctccagagctacttttctctctctccctccctctctctcttgctccccatctctgtgtgtgtgcacgtgcgtgcgcgtgtgtgcgcatgtgtgagcgtatgtgcatgtgtatatgtgtatgtgcgtgtgtgtgtcctgtgtgtgcgtgcttgtgtgtgcatgtgtgtatgtgtatgtgcgtgtgtccatctgtgtgtgtgtccttctgtgtgtgtgcatgtgtgtgtgtgcatgggtgtgtccttctgtgtgtgcgcgcatgtgtgtacgtctgtgtgtgtatgtgtacgtgtgtgtccatctgtgtgcatgtgtgtgcatgtgtgtccatctgtgtgtgtgtgtgcgcacatgtgtgtatgtgttctctttctctcctagtctcttcatccatctatccaccttttagatgctgagaaccatgcccagctgcccaggtgccaggaacccggacatcctcatccactaccaagcaacagacaatccccaccctgtggtcccagctgctgtcaagggacagagcctgtgtgtcttctggcctctctctccctccatcttttttctgcctgctccatttctcccccatcacctgggggtgcctccacttctccaaacctcgcccatcatccagggcctgctctctgttcacccaaacgccctcagtgccccacccatgacccctaccagtgcctccttagcatttgcctggccctcatggacaggctgtgtctctaacagagacacacatctggctcttctgcctcataaaaccagttcccatgcacagccagggcagctctgagttgggagcctggctttaccacagggatggctgtctcatctcttggtctatacaatggggacatttccaagactgaatgagcacctgcattcctagtgcacagcattctcagtttctgacacatggaaaagactcaagatgtgaaattaacattgcctggccaagcgtggtggctcacgcctgtaatcccagcactttgggaggccaaagtgggtggatcacctgaggccaggagttcgagaccagcctggccaacatggtgaaaccccatctctaccaaaaatacaaaattagccaggcatggtggtgtgcatctgtagtcccagttactcgggaggctgaggcaggagaattgcttgagcccaggagggggaggttgcagtgagccgagatcacgccactgcactccagcctgggtgacagaatgagactccatcttaaaaaaaaaaaagaaagaaaaagaaaaaaaagaacatcgccatcgttattatttagtactattatcttgggcttgcagaggcctaagactcagtctgctggtggcccagcacaggcctggcacatggaaagcatccaccaagactcgagggtttgccttgaagatattcatggaaagactcaaatgttacctttctcatcaaagatgaagaagaaaagataaaagagtatttatgggccaggcgtggtggctcatgcctgtaatcccagcactttgggaggcggaagtgggtggatcacgagggccaacatggtgaaaccccgtctctactaaaaatacaaaaattagctgggcgtggtggcaggcgcctgtaatcccagctacttgggaagctgaggcaggagaatcgcttgaacccgggaggcggaggttgcagtgagctgagatcaccccactgcactccagcctggcgaccgagcgagactctgtttcaaaaaaaaaagagtatttacgatgacaaggcccccgaaggccaggcacagtggctcacgcctataatccctgcactttgggaggccaaagtgggtggatcacttgagctcaggagttcaaggccagcctggccaacatggtgaaaccccatctctactaaaaatacaaaaatcagccaggtgtggtggcgtgcgcctgtaattccagctattaggaaggctgaggcaggagaatcacttgaatctaggaggcggaggttgcagtgagctgagattacaccactgaactccagcctgggggacagagtgagactccatctcgaaaaaaagaaggcccccagagtatcttaaaaatgagcctggtaggaaaaatatctaagatccagttgccacacctgctatcactgtgtttactgctggctcagagaacagtcaagacttgcaaatagtaaaactgcatgaagccaacaggcagatttgggaaaaggagccgaatgttcagcgcaagctgtgaaatgaactctctcccttgtattaattgaacctaccattatgtatattgcaaggaagtctctattcatcagaagacaatcccaaacccctaagattttccttcctccctgcaggtcaataaaaagtgattctagccgattcacaatgtctttctagagcacccactaagaatgtgtccagcctgggagggcactgtgacattttcaggtctcagtggagcaggcacacccctgagacagagtattggaaatctgggggtatttatgggctgccatcatcactagggagggggacatggtcttggcctttcctggcctgatgacatccagcaactcatgggacagtcccacacaatacagaaatgtcccacatgccggctcatttcagaacctgccactaacattcttatccgcacgggacagtcccacacaatgcagaaatgtcccatatgccgtctcatttcagaacctgccactaatgttcttatccgtgaaaacactgtttatgatagttagaatttataactctgttttatgtatttctttctttttctttttctttctttctttctttctctttttgagacagagtttcgctcttgttgcccaggctggagtgcagtggtgcaatctcggcttaccgcaacctccgcctcccgggttcaagcgattctcctgcctcacgctcccgagtacctgggattacaggcatgcaccaccacgcccggctaattttgtatttttagtagagttagggtttccccatgttggtcaggctggtcttgaactcctgacctcgggtgatctgcccacctcagcctcccaaagtgctgggattacaggcatgagcctttgcgcccggcctatgtatatcttttttaaatttctttttttttttttttttctgagatggagtctcactctgtcacccaggctggagtgcagcggctcaatctcagctcactgcaaacttcacctcccaggttcaagcgattctcctgcctcagcctcccaagtagctgggattacaggcgcctgccaccatgcccagctattttttgtatttttagtagagacagagtttcaccatgtcggtcaggctggtttcgaactcatgacctcaggtgatccatccacttcgacctcccaaagtgctaggattacaggcgtgagccactgtgcccggccttatgtatatcttatatgaagtattttcctgtatggtttaacatactgcaaatacacttgttttaaatctcgtggctacctgctcctctgcctagacttcttgcatgcaatggtttctgatctttttctttctctgaagcccagcttattcattataaatagatgcctgcatctggctcccttgtcatgagggtagttgtgatgaagcatttccaggtggaaatgcagactgttctgttagaaaccttttcttttttttttttgagacggagtctcgctctgtcgcctaggcctgagtgcagcggcgcgatcttggcgcactgcaagctccgcctcccgggttcacgctattctcctgcctcagcctcccgagtagctgggactacaggcgcccgccaccacgcccggctaatttttttgtatttttagcagagacggggtttcaccgtgttagccaggatggtccctatctcctgaccttgtgatccgcccgcctcagcctcccaaagtgctgggattacaggcgtgagccacagcacccggcccagaaaccttttctttaggcagggcacagtggctcacgcctgtaatcccagcactttgggaggctgaggcgggcagatcacttgaggttgggagttcgagaccagcctggccaacatgacaaaaccccgtctctactaaaaatacaaaaattagctgacgtggtggaacacacctgtaatctcagctactcaggaggctgaggcaggagaatcgctgcctcagagcgacagagaaagactctgtctcaaaaaaaaaaaaaaagaaagaaatagaaatcttttctttataacacagtttggacattatactgactttttgggaagccaaatgcataggggagtttgttaatgaatagctaacatttactctgtttcaggcagactattttaagtctttccacacggaacaattcagttaatcctcatggtagccctatgaagtcagcactctcatgatccccattttacagttgaggaaactgaggcctggagaagataaggaacctgccctaggtcacacagtgagggaatggcagaggtgggatttgaacccaaatctctggcttcaggtgcatggatcaaactctgaggccacaagatctctctttgattacctaagaatttcatatcagcagaaataaaggggatgtaacaaaatatctgttatattctcctttcttccttttctttctttttttagatagagtctcactctgtcacccaggctggagtgcagtggggccacctcggctcactgcaacctccacctcccaggttcaagcaattcccttgcttcagcctcccgagtagctgggattacaggcgggtaccaccatgccaggctagtttttatatttttagtagagatggggtttcaccatgttggccaggctggtctcgaactcctgacctcaagtgatcttcctgcctcgacctcccaaagtgctaggattacaggcatgaaccaccacacctagcttcaaaggcctttctgaaagcctaagtcaggacaccattcattttaacagcaccttaaactgtacgatatatcactgcacacttttcaccatggcagatgggaaactctctcctctttctctctccctctttcaggagccctgtcttctggtgccactgtcctcccctttcctcactgtggcttctgatccctctgttatatatcctccttcacagaaaacccacaaggcatttttctatctctagcttcagatccttcctgggaagaaactgtaactggcagaaacctgacagataggcaaaaatagattacacacatgtgtgaatgaatcctggacacctgcaaataaattatgcatgtgtgtgactgaattaggccaggcccataaataaattatgcaaatgtaggaggcagtcacggggttgtgggaaatacattaggcaaacgttgtcaaggaagactacatagtatgcgagttaagacatggggtgagcgaaaggctaatgattatgagaatataggtataaattatgcagctgtgggtctaaattttgtctcactattggaataaattatgcaaagtggtcacagggcttatattgatgttgggttggatgggagtatacattacactgaagtggcataaattatcccaacatcagaaattgatgatgaataatgaatgaattatgcaaaccgtgattacatatctggcaaatggctaaattatgcagatgtaggtatatatctatgcgagcccatggataaattatgcaaattgcactaagttactcaagccaattagcaatgtcagaaaacactaggctggattatatgcaagggtagtatgaattatgcgaatggaggatgtcttattgcaaaagcgggaatcagttatgcaaaaggtagggagtgtaggaaaacatgtgaacatacgtagcatgcattacacagatcacaggggctccgttagtacatacaacacccttttgggagctaaaaggtgccccttccaagtgagtgtactgttcttaagtgcaaaacagtgcgtccctctggacaaataaatgtttgctgcaccctccagagatatggctgggtagcatcagcaggactccagcccctccagcaggacttgccctgtttggctcaattcccttgtgtagtctggtgacctgcacaaccgtacttggcagccctctcagatgtgagtgtgcatttctgcaaatacagcaatcaacactccaagccaagagcacctctctggattttgcagacacacatgcaccaagaaagcatctatgcgtctttgctcacctggaccacaccgggggaaaaaacagcaaggatgagataaagccagacataggcgaagatgctccaagaggcagtgacaaagaagactctcaggtgcttgatcttgcggctctcgccggctgggatgacgtagatgcacacggcgatgaccacaaacatgttgaaggcagcgctgcccacgatggtgcctgggcccagctcacccgcctggaagttgtggccgcagacttcgatgactgacagcaggatctcaggtgcggaggagcccagggccatgagcgtgaggttggacaccgtctcattccagatgcgaacggtgcccacgctggtctcaccgttggccttggtgatggtgatctccttctcttttgacgtgatgacctcgatggccgccatgaaacggtcggcgatgatggacactcccagaaacatgtagaccatggccacaaagtacaccactgcccgtgccgccttgtcacccagcgacgggtcgtcgggctcccacacgggcagcagcacccccggctggcagcggtaggacccctggcagccccctgtgctggtgtcgctgtcattggccgggggaggcggcagggagggggttggggtggctgccccggagcatgggggagccgccaggaggagtgtgacccccaccaaggccaggggagccatggggggtggtggggtcctatgggggaggaggaggaggtctgggtgagggaagcaaacctctttctgtcatacaaaggtcaaagctcactggggaaggagggttgggggagaagctgaggaccaatgcaggcaggatggggactgagggcgacagagacacagagagtgacagacagagacccacagagagagagagagactgaaagataaggacagaggaacccccatgcactgctggtgggaatgcaaattggtctatgcactttgggcaactacagccgaacaccacgtatcatgcaattcagcagttttgttcctcggtatgtgcctgagaaataggtccttatgtccactaaaaggacctacaagaatgttcatagcaggccgggtgcggtggctacgcctgtaatccctgaactttgggaggctgaggtgggtggatcaggagtttgagaccagcctggccaacatggtgaaaccccgtctctactaaaaatacaaaaattagctgggcagggtggcgggagcctgtaaccccagctactcgggaggctgaggcaggagaatcacttgaacctgggaggcggaggttgcagtgagctgagatggcgctactgtactccagcctgggtgacagagtgagacttcatctcaaataaaataagaatgttcatagcagctttatttataatagcgccaatcttcaaacaacccagaggcctatcagcagtaaaatggagaaatacgtttggaggatttgcacagtggaatattatagagcactgaaaagggagtgaactatttgctgctgcacccagcacatggatgaatctcacagatgtcacaatggctgaatgaagccaagcacaaaagcactcaaactgcaaaattcactgagaggcagggagcaggaggctctgagtttgttaggagattcaaatggtctccaactcggccctttgaaagctcttgctcaggatttgggctgtggcgggtgttgggccgtgtttgtctgtttcaagtggggctggggaggggttgctggagggtctcattcatgtccctccccaaggtggtagcaggcatcagtctctccagcttccctgtgtctgacctgaggttttccccaggctctataagtggtgcagttccttaggggctgtgacatctaagaccctgtgctgggctttctgtcccatttgtgggtgtgggggttctactgtttcattatttctctccctacctctggtgctgagtttgagtggctattaccgtgtcttatctgggtttccttttaaaacacaaatcgctggacacggtggctcacgcctgtaatcccagcactttgaggctgaggcgggtggatcacttgaggtcaggagtttgagaccagcctggccaacatggtgaaaccctgtctcttctaaaaatacaaaaaaaaaaaaaaaaaaaaaaaagccaggtgtggtggcgtgtgcctataatctcagcacttgggaggctgaagcatgagaatcgcttgagccagggaggcagaggttgcagtgagccgagatcatgtcattgcactccagtctgggcgacaaaaccagactctgcctcaaaaacaaaacaaaaccaaaaacaaagcccacaaatcagcttgcctcatccccctactgttcagaacccccgccagctcccatctcactcacagcaccagcgtcctctccagggcccgtgaggtcctgcccaacctggccccgactccctctctggcctcttttcccaccctctcccccttgcccagtctgcctcagccaccctctcctcccctctgctcctcagcctcaccagacaagcttctgccttggagccctggcacctgctgttcccccttcctcgaacacgcttctctatttatgtatttttgagacgggatctcactctgccacccaggctgaagtgcagtggtgccatcacatctcactgcagcctcgacctccagggctcaagcgaccctccctcctcagcctcccaagtagcgggaagtacaggcgtgcgccaccatgcccagctaatttattgtagagccgggagtctctatgttgcccaggctgtttttgaactcctgggttcaggtgctccacctgccttggcctcccaaagtgctgggatcacaggtgcgtgccaccgtgccccgcccactcttcccctcatatccgctagccttgctctctctgccctttcaggtttccactctgatgtcagcttccccaaacaccccatccaaaatgacaccctccccctctggggagcacccctccattccacaggtgagaggaccaaggcgcagagaggttacggaacttgcccacatcatccagcaccaactctggctcccaggtcgcctctccaagagtggccctgactctgagctcctccgccccaccctcatgttgccatggtaacccagtggcttatcaaaaagagaaggagagaggaagagaggtgtcctgggaacctccaccctcccagacccctctgccaccagcctcatttcttccaggggcttccatttgcttgaaaagttcttctgagagtctaacccacagcctgtccccaactcacacctacatacccatgggctgggagctggctcctctgggggagggaggcagcgtgttggcagaacttcccaagaaggagagagcaagcgaggagcatgcctgtgtgcgtgtgtgtgtgtgtgtgtgtgtgtgtgtgtgtgtgcaggcaagggtgggggagaggggtgattcttaaagggccaccgcacaattagccccctcagcaaggcccctaatgatacgtctaattagcagccccctaattagcaacaacttaggcataattacaaacccaccaggatccaaagcaaaggctcatgctcccttctccctccgcctccctggctttcaggagaaacaggggccagccgggagtcaggaattcttctaaagcatcaaaccaaaccccgctctctctgggaggaagcctcggcctgggaagtcctccctcaggtttaaccacctgtccttcctgctgcagtcctcaagagagaccacagccaggtgatgcgggttctcatgtccaccctcctagcccaggggctgggtcaagcacagcctagtgcaatccctttttcctgcaaaacctggtttctcgctggggccttgcgagaggagcagtcagggagagaaagcactagataaatatttgtgaaatgaatgaccaagaggtctgagccctgtcaccagggaccgtgggctccctctgctcctggctcctgcctctccctctccatccaccagcagccctgaaacccaatctgcttttagaatccaggggcaaaaggatcaggtggagcccagggtgggagcggggagggcagatggcaggtaccgtctcccagggccatctctccctcccttcgtgggcgtgcggccagctgggtcggcagtgagcacccctgttctgcctcacgtgcctcttaggtccttgatcagaagaacaggactgcatgcctgggggtgggtgcagtctggcgtgccaggtaagacccgtccttcatatccctcacgctaccaccccacagtggggcggcaagggagggtgcttttctgactgtgcctgtgttggggggctggcccttgcaggaccgagctggggactcagacttctaaacatgcacatttactgccccagcatgagcgcaggcgctcccatcacctcaaaatggtccagtgtggggatcacaccacagagcttgggtgctcgaggctgtgatacactgataatacgtaaactgaggcccagaggaggaacagggctcttaacctagtgctctttaaagccatctgaagccccctccgtgggcactgtcacacagggctgggacctcacctgcagccagggagacatcatacacacacacacacacacacacacacacacacacacacaccagggctacaggcacagcctcgtaccttttcgccatcactcactctcttgcccaccttctccagggcccccttctctcaaggaaggcagacagtgtgttggccagggccctctcagcaccccccactgagacagtgtgaggctggcacaccaggaaagggatggaagtgagactgcaggaaggactggcccggtctaactcagtacctagtgcttgcccagagcaggaaaggcgctcagtaattatcaacaagaatgaatgaatcaagagctggacaaacagcaagaggtatggaagtgagacggcaggaaggactggtccagttacacgaggaagactggggaggttagattgaagggaggtctggtctcatctctactacagaggctaccggttaaactgcaagaaggaccggcctcagaacgccagaaacaaggcagggggaggtgggctcggtcctcaggggagagctggggtgggtgccggctgggaggagtggagagagcaggggagctctgctgaagtggggagaggagtttagaggactccaggcctgggggagcccactctgcgggtgggggggtctaattcctccaggtcccccctgccaggggcggagacaaaggtgtgtgggaggagggtgcactggctcccagggagagccagagaagaggaaagagagagagaaacagagactgagatatccagagacagagatggagacgagggggagatggggagggagggagagagagagagagagagagagacatgcggacatgggaagagacagagacacagagaaagcagagacagagagagacacaggaaagctgagacaagggagagaggcagagacacagagacacagagaaacagagatggcgcaagaggaaaggagagagaaacccaggacttagagacagagccccagagagactccgaacagaccccggcacagagacacagagagagggagacaggagtgagagactgagagacagggactcccagaggcggccagactctgctagacagagacccctgagacatgtggagagacagaaagatgagacccagacacaggaaggcgggggcagaggtagagagcgcgagggggggtgccccagacggggtgggggcggggtgtcctcgccccccagtacccaggcggtccccctccccagccgcccgagaaccaggagggactgaaggtgttggggcggctggtggcactcccaccccacagaaggtacgcgtgctgggccaggcagccccccacctccataaaccagcccagggaagccagctccaggcttcccgaaccgcccccactccgcacctggggtaaccccgtccttttcccacgcccccacctccccaccaatggggtctcttacctgcggctacagcctggagcaggtccccccagcgctgggctggcagtggtgggcgactccgcccgaaagagagagagagattgagagagagaaaagcctgagactgagagggagagccggggaggaggggagggagaggggatagagggaggagaagaggagaggggagggacacgggggagggggaggcggcgagggagcgagggagggggaggagccggagagagggggaggaggcggaggcgggcagagggaaggcggtgcgggaggcggggggaggcccggggaggggcctgggggagcagggagcccgagcctcctccccagcctccgggttcagcaccagaggcaggggacagcaccggagggcgctcctgtgtgtttcagaagcagcccccgccccccaacacacacacacacacacgcacacacacacacgcacgcagtctcccagccatacaagggccaacagctacaaatagttacagacttacagaactagggggagggcaagaatgtttagctggagtcagatccaaattcacatactgtgcctgcacagcctcacaaaggaggccagaaacaaccacaaagacacccattaataagaataacaacagctgccatacatacaggcagccctgaccacgtgcctggcatcggcagcacattattattatttgagacagggtctcactctgtcacccaggctggagtgcagtggcacgatcttggcttactgcagcctcaacctcctgggctcaagcaatcctcctgcctcagcctcctgagtagctgggactacaggtgcccgccaccaccacgccaggctttttccctccattttttttttttaggagatgggatctcaccatgttacccaggctggtctccaactcctgggctcaagcgatccttctgccttggcctcccgagtagctgggactacaggtgcccaccaccaccacgccaggctttttttctcttcattttttttaagagacggggtctcactattttacctaggctagtctccaactcccgggcttaagcaatccttctgcctcggcctcccaaagcgctgagattacaggtgagagccaccgcacaggtgagagccaccgcacctggcatgttctaatgttttttataaatttaggtaaatgctattatgagcttcacttacagacagggaaaccaaggcatgaggtggtaaatatggctccagattctacacccttaactgctgcaccgcacaattccccaggctgaggacgggtcaggtcaagaagagacttgcaggctgggtgcggtggctcacgcctgtaatcccagcactttaggaggctgaggcgagcagatcacttgacgtcaggagttggagaccagcctggccaacatggcgaaaccctgtctcttctaaaaatacaaaaattagccaggccaggtggcacacgcctgtaatcccagctacttgggaggctgaggcaggagaaatcgcttgaacctgggaggtggaggctgcagtgagctgagatcatgccaccgcactctagcctgggtgacagagtgagactccatctccaaaaaaaaaaaaaaaaaagaaagaaatgaactgcaaagggccaggcaggtggcctgggctcctgaagacacaaactcatgcaccctgcgatgggcccacacacatacccccacgcaagcacacacctctgcaaggcacaccagcactacacccacccccaatcctgctcccccccac

SEQ ID NO: 561 - DNA, 54215 bp, Homo sapiens
  source 1..54215: mol_type = genomic DNA
aaagtcactgcgcttgatctgatccaagtaacagtgactgcagttagggtcgagagcttctccgaagcagcggtcatgcaggcttttgtgtggctgacgcttccctttttcacaacagtaaaaagctatcaatgggaaattgtggacttttcccaccagggactcaatggggactcaatgtgcaatattcagtcaacataaaactctttaagaactcctcctgactggtgactgtcaacacttgatctgaaacgtgaatagtttaattttcctgagcaaggagctgcgagtctagctttagaaaagcccctaggagtgtccacctccaccacttccaccgtgcaggcaggtttcaggtgggttggaccctgtgggacttgccgtctgagggatggatggactccgagcaccctccccggctcagcacccgcggcctccgcccactcaatggactgtgcctcccagagcttgggctggatggtctccctgcagaggaccaggagctctgtccaaggcctcgccctgggacgctggaaggggtgggaagggtcaggggtccggggtctaggacaggctcaggggtctcagcaggttctccttggagggcctgagcctggtaggggggcggtgccctgggcccctccatgccccctggtttgttaagggggacagagcagctgctgggccccaccatccacttaaggactggccgtgattcttggcaagctccgcccgccaggccacctctcacccagccagggcaccccgggcgacctccgcgccaggtgcgacagctcaggccggagacctcgtctgtggggacgggccgtgtccggggccgccaccctgagaccgggcgcgggcaggacggaacctgggggggaaacggggcaggtactggctttaggagtctaaatccccaaacgctgagcagacggaagacgttcctgccactttacctgcagttcaaagacctggcgagggcctggaaacggcgctcggcccaggccgcttgcgggcgctgggcctgcagccgctgcaggtcgggccctgagtcctggcgctcgggaggtccctgagtcggtccccgagtcagtccccgggcgcggggctcggttgggggggcccggaaccttgggctggtttcacgcaaatccgtttggggcgagcctcggtttcccggcagcggtgggaaagggcgcgagcggccagccatggcgcgcggacccttcccgccggcggcgtcacagcggcgtctcctcctgctccagcgcgtgcggcggtgcgtggcacgagggcggcagcgacgccagcttcagcagcgcggggcggcggcgcgcgcgaggccgctggaacgagcgccggctgtgcacgcggcgcgccgccgccgaacgcgcgtgcgcactcggcagccctcggcgctccggccccgcccccggcgcaggccccgcccccggctcgccctcgggcggctctgcgggcgcaggcgcggcactctcggagttctgcgcaggcgctggcgtgggcgaggcggggctcggggctcgcggtcgctgtagccgcgcggggatctggggtttctctgggacagcggcggcggcggtgggcggaccgtggcgcggggacgagcggccggttagcggcgtgtcggagccggtgtcacctgcgggagaggaaggcgtgagcggcgcgcggagcccgggcgctggggcgggaggggcgtccccgggggcctcagctgtccccgagcccggcggctctcgcctcccctcccgcggcgcaccccaggctcggcgtccgctggggcctcctcccaggacccgggttcgcggggcagaggcggaagcagcaacagcgaagccccagcccggccccgccacgtccccccgccgggggtcccgggacagcggcctcctcggcgcaggaaggtcccgccccaggccctgcagcgcgggaggtcaaggtccccaaggggacctgcttcctccatctcaaaccgccctggcgtcccccgggtgcctcccaggcccccagagggagctcagaaagcccagaccccacggcccgcccctctccctgctctgagctggaggcagagtccgggtctgcggggccggccctccctgtatccctgtgagagggtcggggacccggggcgtctgtctggcttcccccagccctgctctcagctccctgggagcgcaggatttggactcgcggactagctttcggagccacctaaaggaaatctcaggcggccctagtgccctcagctccgtgggagcagcagagacgccagagtatctctgtccgggctcctgagggaggtgcggccagcagggcgctagaggaggaagaggggctgctggagagagagagcgcgccaggttcaggtccagggaggagagagagcgagcgcgcgaggcggagacctggagggagaggagctgcggagaggggttaggcggggagggagagagagaaccaggttccggtccagggaggagagagacagcgcgcgcgaggcggagacctggaggagaggagctgcggagaggggttaggcggggagagagagagagcgagccaggttcaggtccagggaggagagagacagcgcgcgcgaggcggagacctggagggagaggagctgcggagaggggttaggcggggagggagagagagaaccaggttcaggtccagggaggagagagacagcgcgcgcgaggcggagacctggaggagaggagctgcggagaggggttaggcggggagagagagagagcgagccaggttcaggtccagggaggagagagacagcgcgcgcgaggcggagacctggagggagaggagctgcggagaggggttaggcggggagggagagagccaggttcaggtccagggaggagagagacagcgcgcgcgaggcggagacctggagggagaggagctgcggagaggggttaggcggggagagagagagcgagccaggttcaggtccagggaggagagagacagcgcgcgcgaggcggagacctggagggagaggagctgcggagaggggttaggcggggagggagagagacagcgcgcgcgaggcggagacctggagggagaggagctgcggagaggggttaggcggcgggaggcccgggagcgttacatgtgtgtggactcggggagggcggcggggggccgctcctcggggccgtctgcctgcaggaaggagtccacggacttgctgctgaggcggaagggcatcaggcggcagaaggtgccgggagagtagggaatctgcgtgcgggccctctgcgaggggaccaccgtctccccgggagacagccagggcggcagcctggccaggaggctgcggtccagggcctcgtccggagaaaacacagggttgtcaattcctaggagagagggcagcggctagtcagccttcggagagccccacggcggcaggggagacctcgccggggccgtcacctgctgggtgccttggaaagttagggtcaccgggaaggttagggtcacgtgcctttcaggttgcgggcccttcccccacatccatgaccccacacgccacaggcagcacaggtaacgtctcgcttccctcaagacataccccacctgctccctgcccggcccacgtctccccggacagcagcctccgagttggttgagggggcactcagtgggtgccaagcagggcccttgagaacccacaggagaccccacccccccaggtcccagtgcccctggtccaatgaccgagctccctcctggggcggcaggagccacccctcccttagccacgacgcctgtgccccgtccccacctgcaggggagtcggacgctgtgtccttggtgacactagccaggaactcgatccccccactcatctcctcatcatagttggggggctcctcggtgtctgaaagttccaagtctggggaagacaggttggggtgaggactggggtcactggggggctgtcctcacagcccagtcagcagtgtccatcagctctgtgcacagaggtgcaggcagtcgggacccacagagaggagggctaaaccgcagggctggaggagggaccccacttagagggcagtgtccctggaaccccatcctgggtgggtctgcagctggggccctgaccatgcctcccctgcctgggtggctggagggtccccagaggggaaggtcctgagaggggaggttcccgagccgggagggctggggctgggaggtggtggctcccagtcccagcgttcctgcagggcccccagcgcacctttctccttgatggtgaaattctgcgcagggctctccatgggcagcttcccattggggatgctgctgtttctctgcggagcaaacgtgaagctgctcacaccccgacacagccacacccagccctgactgcccccgctccaggccccagccccgccaagcctcctggtgacccagccttacccgcttctgggcacgctcccgcttgtacagcttggccgccttcttgttctggttgagccccagcttggtcgacttgaaggactccaggcgcttccgcatggtcctgtggaagatttcccggtcctgtttctcgtcctccgtgggcgtgagctcgtgtcggctgtacagatgcttgtactgcgggatcaggcacggaggtcacagctgtgcccaccgccggacattctcgccctcctgccgcaggagctgagcacggatcccccgtggtcccaggaggggacgaggaagccgccccacggggtccctgcggggtcctccagcccccagcccgcagtgcccacctcctgccgcggcttgtacaggtactgctgtagcgtgtggtgcgtgaccatgtcctccgcgtcccggatgctccgccgtcgctgctccagagactgcatgtccaggcagacagcgctgacattttctctcctgcgtggggaccagcgctgagccatacaggctccctcagggtggggtctcttgcgcgcccctcgccttcccacggcgggcatctggccctggctgcctcctgcgtgcccctcgccttcccatggtgggcacccggctggggcacggggacatctgccatctggccagccccttctcccctcggggcttaggctgactccccacgaggccttcctggcctcctgtctgaagtgggtccctttccttactggtccctctccaaagccctggctgtaagactcggggaccccagcatctgcacatctggcagagtggacctcctatgagaactggctgtgagctgtggagcccagggccggaggagcagtaagggtggcatggggaccaggacaggctgctgcgggccaggggcaaacacgtcaggcctggcccccagtccgctgctgcccctccctttcaccttccatccagcactaagggagtctggccacggcctaatataggagggcttgtggaaggagacacccaccccctctttctgcacctctcccctcttccatgccacccccaggccaggagccaccacagccctgtctgtgactctcagctcccgaggctgggctcttccccagggaagctgcatgaccatggccacatacaggaggtaggagacagaggcctccacggtggacgatcgtggcgtgaagtccacgttgaccacgttgtcggtgctgggggagcggatgaaggccagggacccgcggcgctctccctgtggtcaggaagcagcccggtcagtggcctgagcagccaagccctagctgctgccattgtgtgccctggggggaagcgcccagagctcggggcccggggaaagccttgagacctgagccccgggttcacgcctcacagctgcagagggaggggtggaaatgccaaaaccaggagatcagattttgagcccctgtccgtctgaggccacagccaggctgctgcctgaactgggcagaggtcatgcttgtgggaggacacagtggtctgagtgtgaaggggtaaagctgcctgggacttgggatgtgtctggggaaagtgttgatactgcagaatcattgaagtggtctctgtccctgcaggagaccctaaaactccattggcctcatgtccagaactgaatcaggtagagaacggagcagagcccgatggggcacagaagccacacagctgagtgccagaggatggaagtggggccgcctatgtgtcctcagaccccacccgcctgatggcagggcctggagagcatgaggttgtgcaggagcacagggcagagtgggcttatggctggagtcagggtccccagggccggcaggggcacgggtgtggagggaacgtcagctcactgcactcagacctcgccaggtgggcacccgtgccgccttcagtgtgcaggatgctcccagggaagcccccggggtcaggtgggtgccgctgttcccactgaagatgcggcccccagttcactgcccactcgggggggatttgagggtcattggttctgagggccctccgcctgctcttttgcttctaaatccagcatcttctgtatgacctttgtcccgctcctgccaccccacgaagacagacgtgagggtcaggggagccacggtgctaactgccactctgggcgggcacaggcgagggctgtgcagcacccgggcacgtggggtcttcggaggggctgctccccacaccacttcccctgcccctgccgagccctgccgtggggtgggggggcgcagggagagaaagcagccgccctgggtgagagccaggagggacactgggcaggcagatgccaccccaggtgtggggacccccgctactgagtggccgggaggagcccacaggctccccacatgcagctgagcccagggttgtggtcgtgggtcgtgggtcaaggatggtggctggtgtggttgggggagaggctcaaggcccgcctgccaaccttgtcacctatgtgggggtgaggggagcccgccagaggccagagcccccactgtcccttcccaccctccagccaggctccaggcctcctagggccagagtatctgagctttctctcgcttgccgggcctgtggtttgggggtttgtgtggagcctggtccaggagccctccttcctgatctgcactggctggccctcctgacagccccaggcccccgtgccctctgccaggaggtgccttgccacttggcatggccccagtcacgggtggcacatctggggtgaatgcacgtcagtggaggcagaatcattctgtctgaatgaatggagtttccaggcccccactggccctctgtgtgagggtctgcagggtttggcaggacaggtctttctctccggcgagagcacccaccctgaccggctgctggatgagggcaccaaagctcgctagggagggctctgtccttagggaggagctgcggaatccctgcagctgtgcccccaggccctgccttgcacacttcctgcagccagggcgcccctggggaggtcagggcaggccggggaggctgaggcccacctgccatagtgggcaggtgcgggagccagggcggcagtggcctcggggctgggtggggcgcctggcctctggtctctggagcagtcaggggctctgcagacgctgagaggcctgctcatagtggactgggagatgctggagcagcctcagagccatggccggcccacagcgggagacggccctgctgctgcccctctgcctgtgcgtgtgcacctgtgggcacctgcgtgtgctggggcaggcagggctgtattgggaccaggtcccgtaacagcctgcctgcttaccgtctgctcccatccctggggaaagcaagggagctcggggtcctaggacctgacctcagcgctcacccccaccagcaccacagtcaccaggactctgtgactcagtttaccccacgagagcccctgggattcccagggcatcagaaggcccatcagcctcccgtgaactgctggggtgggcctggccttgggacgcgggtgcaggggcctctcctcactgccccatggcacccacagccagtgccagagcctgctgcagccccgacccggcagagcaagcggctctgctacctcagccacgtagctgatggcatccttcaggttcagctcgtggaagacattcaggatccggtctcgagacttctgggccgaccgtctcatgaggaccctgctgaggaacttcctgtcgaagtgggaccacctgtagggacagaccttgggtgtgagcctcaggtgacaggcgccctagagcccgccggacgcgtggcccggccccttctctcctgaattttgtttgctatagtgaccctgtaggcgcgtttaaaatgagggaagcagcccctgccacacgcccaggccgtccgccgttctcccgcctgtcctgttggatggaggccgttagacgcatatgaaactgcatgccgcctcctccagagggtggctcaggacacggtgggtgtcaggcctggtcaggcaagggggctttggccacatggggggcaccttcaggtgcacaggaggaagggcaggggcggacagacaccctgagcccttagacttgtgggagccaagctgaccagagtgaggttttttttagcctaacggaattagagtattcgctggttatccagatcagaagggacggtggcctggccggacttagaggaaactctggggcacaaggaggtgatgcctgtcacttggacatgggtgcagccgccagagccgccctccagggcacagggtgggcccgggtgagcttgtgtgctcacacctgggcaggccccgcggcagcaatggcagctctcctgtacaggctgagtttcagccacaccaagaagtcaaagctaaccgaggctgtgccttccgagacccccgggatggcccctgggaggccaaggagtcggggactgggtacccggagcagagtcactgtggccacggagaaccgcagctgagctttatgaagccacgtggccacacctcccggtgcctccaccccaagcaaacacagatcgctcagaaaatgggaacccagggcaaattgtatgtgctccttactgggtttattataagtgtcacatgttttttataataaaacataggtgatttcaccttaatggacaaactcttttttttattttgggacgaagtctcgctctgtcaccaggctggaatgtaatggcgcaatctcggctcaccgcagcctccacctcccgggttcaagcgattcttgtgccttagcctcctgagtagctgggattacaggcccacgccaccacccctggctaatgtttgtatttttagtagagacggggtttcaccatgttggctaggctggtctcaaactcctgacctcaagtgagctgaccacctcagtctcccaaagtgctgggattacaggcttgagccctgccagacaaaatcattttaaatgttgactgatactaaccctgtttatgacgtggaggaaataatctatttgccttattttcaattcctacataacaatttggaattaattgggccacatgagagggcatctctattccctggaaggagcacagagaattcagctcctgtcccctcactcggtggccccaactgctgccgccaactcctttccgcagcacctgcgtgtctcggggcacacctggcacctggcctcatggggcaccggagccctgaccaagcctggactcaaacagttgttatgcatgtggcttctggttcttccgagtggaggatgtttccagaagccgggctgtgcgacaccgccggggccgtcccagccacttacttgtctctgagataattgtgcccgatctgtccggatatgtcctcgatggccgagaggatgtggtcgaaagcctttcaagggaagaaagacatgagcgtctcggggcggccaaccggggaacatgaggtgcccctccactcctggcccagccccgaggaacccaccagcccccctcaccacgcccctggcctggacgcagcctcctctcccctcctggcccagccccaaggaacacacggtgccctccgccaccccccaagccccagaccaacgcagcctcctctcccctctcagcccagccccgaggaacacgcagtgcccccccccgccccccagccccgcacgtatggcggcctcctctcccctcctggcccagccccaaggaacacacggtgccctccgccaccccccaagccccagaccaacgcagcctcctctcccctctcagcccagccccgaggaacacgcagtgccccccccccgccccccagccccgcacttacgcgcccgtgcagcttctcgttgagccgaggttcccggtgctcgctcctcttcaccttcagccactgcaccagaggcttgatggtcaggccctggaggacagggtctcgtgaccctggtgccaggcagccccccacatcccgctggcccggccaggtgcaccacacagagccacctgccccggggcccacaggcgccctccctgctctccgggcacccagcaacccgcgcccctgctttgcagaggaggaagcagcacccggggcctcatccaccagcgaaggcccgggaagaacatttttaggacaattatgcttcctccccagtggggccacgtgaaaacctacaaaacggctcctagttactaaaattatgaaacccaattagggtctggagcctggaaatgcttgtcctgaagtgcgggcccaggctcccctcgcgggcggggccgagaccccagggctggctgggctgggcctcacctggaagatgacggtgaagaacactacgatgatggtggtgctgacgaacaggttcttctccttgaccttgtctccatccagaagcaccaccagggcaaaggccacggccccgcgcaggcccccgtaggacaggaccacctggtcaatgggctccagctgcaccatgcggtagcggttcagaagccaggtctgcaggaccacacctgcggatgatggggcgggcactcagctccccggccgccctcccagccgcgggaccccagcccctccgggacagcgtcttggcggccaagcatgtgctgacgaagaacagcggcaccctagatacggcgtccccacaccacgtccctcgtcaccatccacccggagccacacgcggcctggcgtctcccccccacgctccgtgcatcacacacacgggtgctgggggatggggctgggcgggggcggggctgtcttgcttcccgttccatctctcgtgccactgaccctgtcttgaggcacatccagtggagtcagtgggaaaccaagtggtttcccttggggttccagagcctcccaccccagccccgaggccgccaccatcaggtcctctcctctgccttgcacggggctgcacctccatctccctgggcccagtagaaagcctgcgccttcccggagacggtgccggcccatcggtggtcccacggccgcaacccggccccgcctcaccgatggcccggtacacggagatgaagaccagcgtcaggagcacgaaggccgtgttccaggtccagatgaacgggttcacggccgagatacccaggaacatgaagatgatggtctcggcgctgctggccagcatcttcatggtgtagcgcacggtggtggccgactgctccgagatgttggccttcacatacttctgacagcagatgccacagaaggtgatgctgcagggacagacgcgcctcaggacacggccacctggcctggcgcccgaggcccccgtgtccgcccagccccccacggcctggcgcctgtaggcccagagtcacagttgtgtggttacgggggcctcttcctcccgagccaggctgggccgccagggttcctgcccacagccctgcgggggccacaggcggcatcaccgtcatgcagataatgggcaccggggctgcctgccagcagggagggcaacaaagggttccaaagtccctccccacctgacctgtctcagggtgggcactgctgtcggcccacagacaattcagtggaaacgccaactccttattttaaaatttaaataaattctttgccccacactgaattcccacccagcctgggagcgccagcggagcgggcgaggtgacgggacactgctctgaaggtcccgcgctaggacagagggcaggggaggccctccacttcctgtacttcccctcacgggggttcacggggaacttggtgatgcagagcccggagcttctgccacacacacccccggtgtccatgcggctggcacctccctccgagttggggtccccctggctggctcaccccgccggacccaggagggtgtggagaagctcgggttggggtccccctggctggctcgccccgccggacccaggagggtgtggagaagctcgggttggggtccccctggctggctcgccccgccggacccaggagggtgtggagaagctcgggttggggtccccctggctggctcgccccgccggacccaggagggtgtggagaagctcgggttggggtccccctggctggctcgccccgccggacccaggagggtgtggagaagctcgggttggggtccccctggctggctcgccccgccggacccaggagggtgtggagaagctcgggttggggtccccctggctggctcgccctgccggacccaggagggtgtggagaagctcgggaggagggcgtggagaagctcgcgtgtgtgggagggactcacgcgaggatggccgacagcgacagcatctcggacgtcaggtaggacaggtaggagatgatgaacacgaagccgggctcgatgatacgcacatgcttggtgaagcgcgtcaccagcgacagcaggaaggcgaagaccacccccaccagcgtgccccccaggctcaccacgaagaaggacactgggtagaggacgccctttgtggccgtgccggccttccgggcccttccttgccaggggccgcctggtgaccccgcggaagtgccgggagcccgggaaacgggggtggatccctcactctcttggagatcgggcctggtctcagcaccagccttggttcagcaagtggggaggaccctcccgtgcccctgggagcctggccccaggccctatccggccgtctgtctcaggaagacctggctgccctcatccctgttctgggaaacacccaggaacccccaggaccatgtcaaatcgtgtgtgaatcgctctggacggggacgtgacgtggacagaagggcccagtgtagcagctttgagtgcaaagctttttcctgcatgggctgcaggccagagaagacagttggccccagaggagacacggccgcccactccccctgacccacagctacacacctatgcccttcacgcagtccacgccagtcacgttgtcacctcccagcgccacgaaagattcaaacacattgtacagaacctgcagggaaaacgggcagggcgttgggtggtccttggttagtgccaccccctctccggggcccgggcctcgctggacttggcccgagtgtggagcccatggcacccgaggccgttggaaggaaaatcatcacagggcaatggcccccaaaggggagaagcccagagcccagcagccagcaagacatggggcaaaagaatgttctggaggggaccagaagctttgggagcaaagctggcctcttcctatcctctgcaaaacaggggcagctgcaaagctccctgccacttgaattctgagtctcatctacggagacaaacccagggtgtcagtttgagtgacttccctgctgtgctggctctagcccctgccgtctttgcatgtttttaaaccttagcccggcaaaacccagagataaaatgcggggaaaccttatccacgccctgggctccacgcccagcaaagtggtgacgcaggtgagaccggccgagggccgtcctgggtgggccgaggcccctggggagaacctggctctgcacccagctctgtgtctctggctctggccaaggtgggagaggaccctggggcaggcgtgtaagttgggtttgcaaatgcaggctggggtggggggcccatgagggtcccggggtctcttggggccttctcggagctgggctttttaatgaaaatccagctgggagggaagacaacctcttgggagactcttgcttctccagggacgggagccgcagggctgcggggcacacggggctgtcactctattcccgattaagtctcacttcccaaattcccccgagaatatcttgccgtctggtgtgcgacacccacaggactttcctctttccaaaacccctaagggaacatgagaggctgacgggtttcaaacctttcaaaccacaggcactttcagaggggagaggaagctgaccccacccttccctccggctgcgtctgcagggtcctcggggctgggggaggatgggcaggggcagcacggggcgggggcagtgtgggggctgggatggtgtcggggccgggcccagggctggcctcactgacggttcctaggagggccactctgcacgtgcccctcggatggccccatgactcacttccgggaggcagtggccccatttgatgggattggctttgaaacgtcacgattgtcactgtgaagtagtaaccatgttccttggggttcctgaatcttctcctggccttactgagcgctgatgtggcctttgggcctctgtggaggcaccgtccccgcctcccggaacaccatctcctccagggacacccacacaccgtccgggctctgccgttagcaccagttcagtttccctcccttcacctctgtcatgggccaaattgtgcccccgaaattcccatgttaaagtccccaggacctgggcatgtgagcgtgaaaaaggggagtatggcacagtcaggtcaccggggtggaccctgatccaataggacccgtgtccctgtgagaggaggcgactcgggcacattcacgcagggacggccacgtgaggacacgggaaggcaccgtctgcaagtccaggaccggggtcccgcaggagcccaccacactgacaccgtgatccagaccgcactgacacccaccgcactgacaccgtgatccagaccgcactgacacccaccacactgacacccaccgcactgacacccaccacactgacaccgtgatccagaccgcactgacacccaccgcactgacaccgtgatccagaccgcactgacacccaccacactgacacccaccgcactgacacccaccacactgacacccaccgcactgacacccaccacactgacaccgtgatccagaccgcactgacacccaccacactgacacccaccgcactgacacccaccacactgacaccgtgatccagaccgcactgacacccaccacactgacacccaccgcactgacacccaccacactgacaccgtgatccagaccgcactgacacccaccacactgacacccaccgcactgacacccaccacactgacaccgtgatccagaccgcactgacacccaccacactgacacccaccgcactgacacccaccacactgacaccgtgatccagaccgcactgacacccaccacactgacacccaccgcactgacacccaccacactgacaccgtgatccagaccgcactgacacccaccacactgacacccaccgcactgacacccaccacactgacaccgtgatccagaccgcactgacacccaccgcactgacacccaccacactgacacccaccacactgacacccaccgtcgttcaaggcactgcacctgcggtactttgtcatggcggccctggcagattacgtggttcctatgggattttgttgtttgctattcacgtatttattttatttgagatggagtctcactctgtcacccaggctggagtgcgatggcacgatctcggctcattgcaacctctgcctcctggtttcaggtgattctcctgtctcagcctccccagtagctgggattacaggcgcgtgccaccacccctggctaatttttgtatttttagtagagacggggtttcaccatgttggccaggctggtctcgaactgctgacctcaggtgatccacctgcctcggcctcccaaagtgctgggattacaggcgtgagccaccgcacccggccactcatgtattttttaggaactcaggaatgggtggcagtaactgtgggtccaaagtcacagacgctctggggaccaggagggcgggatttcaacagcgccatcattaaccctgaagctatggagtgggcgggcagggcctgggaactgtggaagatacaaagaagcctcgcgaaagctgccagtcgttctgagctgggaggaaggaggtggagggacgggacgcccccgggaggggagtttgaggacagggtttcacgccctcctttgctgactgaccgatggggggtgagacggggcccaggcctcccacggctcgcccgctctggagcggtggctccgttgctcaccacggtgactgcgtcgttcagcagcgactccccgaagacgatgatgaacaggacctcgttgacatggacctcctcaaacacggccaggacggccaccgggtccacagccgccatgaggctgccaaacaggaggaagtccagcagcccaatctgcaggtcgcctggaagacaagccgggccgcggggcagctgcagggcctgccacccgaggaggagggccctggggaggcgctcgcctacgggtcggggttcggagcccgtctggctggcgccggtggcgtggggagctgggtcagcttcctgcgtccctcccacagacccccagccccctccagggaaggctgctgtcttccgagggggccaccccatctgagcaagacagacagacagactgaccctggccctggccctctccttcatctttgggtgaacggaggcaggtgggtgcaggggcaccgcatgctggggagggatgggggcccatcgcctggagtggcgtcccagcccaggagaagcaagtggggctgacccaggacgggcccggagccgggacacacagcacccaggggcgcggccagggaggggcaggtgggagggccgttgggggtgtgggggcagattgtggggatgagcagggctgcggtgggagcaagggggcccggaagacgtgggtccatgtggtccctagctcccggccggcttccctccccgcatctgcctgtgggctctggtgcccctcgctggggaggttttactgaaatgcagccttatccttcacaagtctttgccattcaacccagggttcaggcctcgaggaggccacgtgggggtgccaggctccaggggaccctcagggaactgagtgtggccacgtggccccgagagtctgccctctctcacggccgcagggctcagaggacactgggcctccttgctgccttcccggccgtgagggtccagggaccaggagacgccagggccgtgagggtgtgggagagaccacccagggagggggaggcccccgacgagtccccccgcacagctgctgcctctctgctgggctggagcggagcccaccacccctctgggctgaggctcgggctgaggaggggtttgtccctggagccggacgggccccaggagacagcagagagcagcctggccaggggtttctgtgctggcgcctgggaggggacagatcagggtcatctctgcggtgactaaaccccgagtttgctgtgagctcctaagccccagcagcctctggccagtgtcacaacaccccgaggaagtgacagatgccagaagaaccagcgttcagggagttaaagttccatgttggaacgggaaccacacaagccttctcctcttccaaactcaggcctcaggacacgaatccccttcaaggtcatctttaaacgcggcctcctggcacggccgcccccagggcagtgatggcccccatggatgtcctggggtcggccgcgttcagactccccggccggcagccttcccgtctggacagttgcccacggccgtgccaggagggctcatgccaccagaccgcatgttccaggcctttctccaccacgtgctttgcctgtgcaagggcctctgatgcctgaagctctcgcagggcctgtccccacactgcccggacagcccccgggccagcactgccatgtcgaccctttcccatggggcacgtttggccttgagacgctccacagggcttggcctctggtctgcagagatcagttgcagcctcccagctctcttggactcccaggaatgggatggacctgccggccatgggcatctctgttccagaacctcaggcagcacccagctttgaccagctgggccccaaggctgagcgcaggcctccagcatccgtgtcacctggggagcggcctgccccagggggcacagcgatacctgggacacgtgtttctcatgaggagcgttgttggaggacggtagagtccagcgtggcgaggggcaggggtggagtgcagcgtggcgaggggcaggggagggccaggggtgacgtcctggtgtggggagtcctccagggcttcatggtgcaggtgcagcaaggacgtcctccaggctcggccagttgcaccgaggacattctgcttcgtgcaagggaaatccggcagtgtctctggccaatgctaggcggggaccattgtgacgtggccacagagccacggagtgtgcccggctctcaaaggagcggccctgacggccagactgatcacaggctactccatcccacactcgacacagctgggaggaagctgggatctcatgggcgaggggccatctggcaaggtaggtgtgagcctcgaggggccgcgggtccaggagtctctgctacaacccctgaggctttcccttgggtgcggtggctagggcggctgccccatccgaggtgtgtcctgaccacctatggcatcgcccacgtgacgggcctgccatccatgagcctgtctgtgccctcggcagctttccctgggctgcacctggtgggtgatgctggacggcagggactacagggaggggtgagaaggcgccaaggaaccacgtgctgggtgaggcggccccaacccgggagctcctctttctccatgcgtctccttggtctcaggtttcagccccttgattcccatggagaggccgggccgtgctctctcttgaaccagacggaaaatcgccaattcttgtgagtctggttcagctggtggatttgtttgaggctgagttctcagaccggtgagggcggcaggtgccggaggcctgcgctcagccgtggggcccagctggtcaaagctaggctctgcctgaggtccctggacccacctggtcaaagctgtagcatccccggcagcagcggcgggcatcagggctgcaccgcacctggcatgttgagaggcgccagccacgcgtggtctgggtccggggcgggaggcagtgcccgagagatgaagcatccaagaccaaaaccgcgcagcagttctggctccggctgtggctgcagcggtggccgagcggctccggcacacaggctgggagggacggtgcccgatacaccaggctctgcagtcctcctcctctccctgggacctggtggccggcgagtgtggacggacccctacctctgcccagtgccggaggaagagcggcagcccctggccacctgcagcccccaagccgagctgccgagatgggaactcctccccaagcagaacacgtgctgggacctggggacgcgcaggggactggccttggtcacgagggcctacggggctgccagccacgtttctcacctgacacttaccgcctggaggccagggtgcggcaccccgacctttctgagatgaggcagcgccgcccctcccggaccccaccctgatcccggccggggcaacagtggcgcagactcacccatgagcccactgaggaagacgccgtagagggacagcccggtggtggccgcgttccacacggtacccacgacggcgtacaacaggatggtccccaggttgccgaagaagaggcggttgggcatgaagtagccggcgtccagcacgatggggggcagcaggtagaagaagaagacggtgggcgtcagtgtgaaggacgcgatgtggtcggccgcccagacgatgccgcccagcaccaggcccagcacgatgagcagggcgctctcgggaaccacgctggtgaccttgtgggacaggtggaaccctgtgggggaagggagggaggtcagggccgggctgtgagggaggggagggaggtcagggccgggctgtgagggaggggagggaggtgtggggactcgtgggggaggggagggatgtcggggcagggcctgttggggagggaggtcagcggggactcgtggaggaagggaggaaggtgtggggactcacaggggaggggagggaggtcggggtgggacccgtgcggcagaggagggaggtcagggtggggccttgggagagggcaggtaggtggggggagcccatgggggaggggagggaggtaggggggaacccacaggggaggggagggaggtcggggtgggacctgcgggggaggggagggaggtcagggcagagccctcgggggaggggagggaggtccaggtgatcaggtcccacagggctcagagctgcaggcatctaagacctcccccgacttttcagggagcccaagagggctgggaacgaggagagtgcaggggcagctgctggagcccccagaagggagtcagttggaggagggagccggtgctatggggtggaggcccgtgctggatggacggtggtcgggggggggcctctgacctgccgccccaccgcccggctggttctggtcccccggacccccaactcgctctgtgccttttgccttggtgaccaaggtctgagctcaccctgtccctgacgttgtggccagagcctgctcccacttgaggctggctgtgtttcagacccctccggaggggccccatggaggctgtggccccctctcctcgtgcccctctcctgggatcacggcccctgggtggggtgttctaggaagagtctctgggtcccgccactccactccgcacgggtgagcttaagggtggacagcaggtcctggggaccccccgtggagcttcaccccgtcccccagcaccatcgcccctgccaggacctcagaggctctgcccggccctgtgggtgggggtgcaggcaccaacctatctgggccatgtctcctgtgttttagttggactcagaaaaaaaaaaaaaggtgatgagaattcctgcgctcggcctgatttcaaaatagcgggaagcctgacaaatgaggtgcgtcctccggcttcggtgatgtaagggataatgagcttcttcattccctcagctgctggttattaagtcttctttgaaattcaaaggaaagttgtctcctgagatggccaagaccccatttaagcacagagcagcgggagcggggaggctccctccacaccacccgcccccgaagaatgtgtcagcacagctggaggggcggtggaggcagtggccacgtcccacccttcccgactgcgtggccctgacgagctcggccctccctgcctgttttctcccttgtaattacggagctcttgcagggccgggtgctggcccagaggagggaggtgctgttctggatttgccgttccttccccgaggatggtcttacaccaaataccacgggtggcatgggcccctctagggagggtggcaggcacaagctccgcacctgcccggccaccagcactgcactgcggtctcccgaccctgtccccaggacagcggctctgcctgctgctccagattccaaaacaccagccccgggagggatcggggttcagaggctcctgctttcaggatgggaggtcctgctgtgggccccgtccccaccatgtgccccacaggctctctgagccccccgacggctcccccactccgggctgcacatcctgcacagatctgagctccacacctgtcaggcagggcagcgggggttggcccggggaggctggaaccacgcgacagtgataaccaaaccaggggagggcatggcctgcaatgagggagggcctggcctggaatgagggagggaggctgtccctggggaacacggagggtgagctccctggagtcctcggggccccgctcagagctggcctgcagggtcccgtctgctccagctttcagcaggagagcatccgtagggttgaccttgctctctccccacagctctcccttctctagaaggtgctccccagctgggagtggctgtgatgcacgtgagaagtcctgggaccctaacgcgtgccccgacagccccgtcctcagcagcgccctccccagatctgggctcacggggctggcagcccagcaggaaaacaggggcccctcttctctgggctccacggcctggtccctgtggtggccagggacagacctggcctcgcagagctttgggaagagacatgggtggccttccgggcctgcgaggggaaggctgtggcctctgctcagggcagcctgggaccccctccacagccgggactcagcaggttctaggctggcatgggagtctgcacactaagggctccgaggcctttgggagtcctgctgggggtccctatggtgcaggaaggcctggggcaggtgttcccacctctgcagcctcctgatttttttaataatgtccagagagaagtggagtttaccacttccttcctttcttcctgagggctgtaaatccccgccttggtgtcccaagctgtgttaggaagaccagggtggtctgtgcccggtgccggcgcctgcccacccgcaggctgacccgcgcctctcacatctgtccttggcgacgtcgtcacctctgctgctggcgacgagtgcctagcaaagccgggcacagccgtggtgatggtgaccccctggaggctgcccagccgctggcaagacccacccaggccgctgttttctacacgatgcacgttctttgcctctgcccacgtcccaggctggctcctggaggggtaatcggctcacctgtcctcctcttttcagggtcacaagacctgggagatggtatttgtccaatagcgcttgtggagcagccagcggggcacgtgtggcccctcggtgcccgccggcacgtgggctgctttgaggataaaatccagcgaccacagagaccgcgtgtccccaggtgggggggcgccgtggccgcaggtcagacctgggaagcagcgggagtctcggagctcctggacgccctcacccttggtggctgccgacacttggcccggggtctttttgttgagggttagggtctttcagccacagtcttccaaaattaggttcacagcgatcaccaccgttgtgaagccaccccagacaaccgcgggccagcaagtcagggacacagggacacagggaccagctttgtctttaaaaacaacaacgcaactctgtgccctggggactcacagtgctccccgcgccatcgccgaccctccccacgctccactccccgcgccatcgccgaccctccccacgctccactccccgcgccatcgccgaccctccccacgctccactccccgcgccatcgccgaccctccccacgctccactccccgcgccatcgccgaccctccccacgctccactccccgcgccatcgccgaccctccccacgctccactccccgcgccatcgccgaccctccccacgctccactccccgcgccatcgccgaccctccccacgctccactccccgcgccatcgccgaccctccccacgctccactccccgcgccatcgccgaccctccccacgctccactccccgcgccatcgccgaccctccccacgctccactccccgcgccatcgccgaccctccccacgctccactccccgcgccatcgccgaccctccccacgctccactccccgcgccatcgccgaccctccccacgctccactccccgcgccatcgccgaccctccccacgctccactccccgcgccatcgccgaccctccccacgctccactccccgcgccatcgccgaccctccccacgctccagtgaggccgctggttactgtaaaagcctgttaactgggacactggtgggtgagggacaggctggcttcagaccaaacactcctgctcagaagtaagcccttaaaatccacagaaaacatcctctgaccttggtagttactgagaaaatatacatatatacgcacaaacgccgcataggtgggagggcggcggtttggaacattctgccatccggggttggaaagggtgttggacacgcctttcccatgtgcggtggcgtccgagggcagctcctgcagtcttcagggtgtgtgtgtgttgagagctcacctgtgtcctcctgcatgggacatgccgtcccacctgcccacgggggaggagccgcacccatccccaccggccaggcaggcgtgagccacatctcctgaggggcccaacctaacagcctctgacgacctgtgggtgacgcgtgaacgaccccgttctgtgaaagtgtcggcttgctcccctgccgggcactgatcctttcctattgacacgaggttcttcgtaagctggaaaatccagcctttgcttatgtcttcagcggcaggtagattttcactttcaaaaatgttgctctcatctttccactttgtcttctgtcattttgctccatgcgaacgtcttttctttttatagttaaatttattggtcttttgttttatggcttctgagttttgtgttatacttaacaaagccattcctgctcatgtttcctgctaaattttttagcaggaaaaataaaggcactcaattaaattttccttgaaggctggacttagtggttcacacctgtaatcccaatacaacagtttgggaggccaaggcaggtggatcccttgagcccaggagttcgagaccagcctgggcaacatggcgaaaccccatctttacaaaaaaaaatacaaaaactctgctgggcatggtggcacacaactgtagtcccagctactcaggaggccgaggtgggaggatcacctgagcctgggaggttgaggctgcagtgagccaagatcacaccactacattccagcctgggcgacggaggccttgtctcaaaaaaaaaattttttttttacttgaatttaacagagaaaatagttaaaaatagttgcaactcagaaggccctgctagcctcagagagacagtctttccacacagatgtctgttcttgaaatccccgagcctggaagtggatctgggtggcactggtgggtgctcccggtgcccaggccgctgccccgcaggtgcccctcaagtcacaccactgctctgcctcgggcgacacggtgcactggccgaattccctccaggtgcaggagtcgacgccccccactgccctcgaaacctggtttctctgctcccgggtctcaaatccgggttcttcccttgacagctggcgtccaccctcgagcatttgcgaatgtcaggctgacacctgtgtctgagcctgtctgggcaccgggactgctgtgaaggacacagtcagccggactttgcttagttcacctgtcggagccactcgttcacgtttatctctgtctggttgtcagaataaattgtttccaaccaggaaacaaggatatctcttaacacaattgttctattctttggttattcctccacttcaaagaagcttcctgaagcttccagatcccctgcagcccccctgagccgctgaccctgacccctgggagtgaagcctcatctgcccctgtcctgggtggggtcgcccggccgcatccccagcctctgcccctgtcccgggtggggtcgcccggccgcatccccagcctctgcccctgtcccgggtggggtcgcccggccgcatccccagcctctgcccctgtcccgggtggggtcgcccggccgcatccccagcctctgcccctgtcccgggtggggtcgcccggccgcatccccagcctctgccctccgacaactcaggcacctgctggtcagctatgaagccttagcctcgcttgtgggagtccctgcctcacggatgccggcctcctgcctcggccaccgccctcctcttcaaggatgctgttttgcctctggtcgctctatcttatcttttttctccgcactcctggacgtctctcggacctttcgctctgacagtggcttgagcctcggccgccacttccgcccctgctacttcggggccacgtctcggtccgacgctgaggggtgctgccaaccgtgtcttctctgtgaacgtcctcacgatgaacgcccccgttccacttcccaccctggagctgctgcttccgtgactcacattccggccatttccgtggtgtgaggtacgggcgggactccttctgcttcttgtcacacttgtcccgggctgggctcttccccgccagccccacttcctgccttccagcatcagtccagccactgagcccttttcttttgagacatcatctcgttctgtcacctggactggagtgcagcggcaccacctcggctcactgcaacctccgcctcctgggttcaagcgattctcctgcctcagcctctgagtagctgggattacaggcgtgcgccaccatgcccagcaaatttttgtattttttgtagagatggagtttcaccatgctggccaggctggtcttaaactcctggggtcaagcgacacgcccacctcggtcgtccacagtgctgggatcacaggcgtgagccaccgtgcctggccaaccgtgtcttctccccttgcttgtgcccgccgtggaaggttctgtggacattctctgcacaaccccgctttgggaagagtgcccctgctggcctcggctgcctctcctggggtgtgtctccctgctgagctggctttgggtgggacactgctttctacccattctcctgtggcagaggagtcctgcagcgtctcctctggtatcggatggcagtttcgccccagccagggtggggggtctcctgggcttctgcttcttcctcctgaggaggtgccaaggccaggcctctccttggtgaccctgcatctccctggtttgggacactggactggggaccaagagaggggaagggtctcgttctcatcttctcctgaaaccaggggctctgcggttgatggaagtcctcagagggcgtcctcagcctggggctggtctgctccacacggcttttcccaaggacccatggcctcctcttgaacggcagtctgcattgtaattagctggtgaaaccaagaactcaattggttttaagaggcaatttgctagtagtttggcaattaagcacacaatggacgtttgggagccaagtccctgtgctgtgagccctgcagggtccagttcctgctgccagtcggtattgagtgccagggactggcctggcatgagggcctgacccgggcagtgctgtccacatgcacacagccggggccaccccgctttctgggggcatctgccggcaccaaccaggcctgggcctgtggttagggcctgttccacagactcattccaggcaaggcgcttacttactgccacaatctgcacgtttttaggatgggatgacgacacttgggttccagggtccctgtgtggaaacgtccccacatgctgggccgtccttccttcctgtgccctctgtccgccatctccagacaccgcccagtgcctgatgccgtctgcagctccctctggtctgacaaccagtcactcctgctccctggggacacgtgggccctcgaggctctagaacgggagggaggtggctggcagggcccgagataatgccaaggtggctcctagagaccttgcatctgcgcataacgtctccgtagatcagcagaaggcccagccactcccagtccagggtccagcccctctgtaggggccactgctcaagccagcatggctacagagataccatgggagtgtggaggggccactgcacctcaaagaagaaggaacccacagccctgggccccgtcggagccaccacaggcgcagggcacagcctcctcggcccagagctgttgggcaggagctgcagggtggctgggacgcaacaggcagcgacatcttcaaccttctaccagaagagcctcaggtccaccgcactgactgcggcaaccccggccctgtgggttgaaagggcagagggtgtctgaggccttaaggaaatgaagagaatagaactcgccccatggcacacactgtgagggaaccaggcggtgtgggaccctcccgagacgcactatgcagagcctgggctcagccacacaactgcagaagccaaaccacgagaagctccacagacggaaccggcttccggcaccactgggacacgccacgaggctcccccagctaggtgcacacacggcatgcgactggcgtggatccctggcgagaatggaagggggggtggcaggagacggggacgggaccctccagggacacaggaaacacacaccaagcacggagaggccaggcgggccggtgtggacagggggccggtgtggacacggggccagtgtagatggggccagtgtggacggggctggtgtgggaggggctggtgtggatgggtcagtgtggacacagggccggtgtggacatggggtcagtgtggaaggggccggtgtggatggggcaggcgtggatggggctggtgtggacatggggctagtatggatggggctggtgtggatggggccgtgtggatggggccagtgtggatggggctggtgggtgtggacggggctggtgtggacggggtcagtgtggacacagggccagtgtggacatggggtcagtgtggaaggggctggtgtggatggggcaggcgtggatggggctggtgggtgtggacggggctggtgtggatggggccagtgtggacacagagtcagtgtggacatggggtcggtgtggacgaggctggtgtggacacgggccggtgtggacagggccaggccctgagtccgcctgccacagcccgtgtggcttccacacaaggggacaaacctggggacacgcaggccctcaggtaactgattgccgaggctggagagtcacagctaattaagcacacaatggcttggtggcctgatggttacgacaggggacagacgcttttagttctaattacaaaccctgtgcctggaggaggaagggccggcgctggcaaaccagacatttccggatgggcgccggaaagggcttctctctgggccccggggggctcaggaaggccacggcccaatgcatgtcacacccctcggagcacagagggacggggcttggtcaggcccagggcctccgccacctccaaggacctttcaaggtggcagagattcagccgagtccacaaaaatgcaacagcgcagtcaatcctgtggttttactttaacaggaacacgtcccggaggattaaactctgcctcccagaaacagcctggctgagcggtggggcggtgaggccaggaaggagggcggaagcacaggtacccaccctcccgggggacgaggggccggggcattccacaggcaggcgcagacacatgcaggaacacgtgcacgcacacagagactcgcagagacgcagagacgtgcagagacacacagaggagacacgcacagggtccaccctgttctcctagcacagctgtgggtctgagttctctgccacccgcccctgcaggtccagcagagctcgccagcacactctgacctcagtatcactttacccgcctgtggggcaccggcgaggaatcacggtaaatgtgtcggccgtcaagcccagggcggaggtaaaggtgctcacggaggtccgccgtgcggcctggcagacgtgcctgcgtgaccccacgcgtccctgcctgcgggtgcagttccccgtgagtactcaggttggcgtgggacaggggagccggctcccgggggccacgcaggaagcccctctccgagcgaggccgggcccccgggccgggaagctgcttcctgccagatgaagttcacacagctccaagaacaacagcccgttcaggactggactccctgcgctcaagtcacaaggcgttttacacattgtacatttacaacactcgagcaaacctggtcggtttttaaattgaaacatgaatgttgcccacggttccctagagaatcaggagatccttcgactccaaaccaccctgagcaaccgcgctggggcaaaatgaacgcagcctctgagccagccacggcctctgtccaggacgctgggcagaccccacaccccttcctctctgggacccagccgctccggccccccacccccagagacggcccaggcccccttattagcagcgtgagaacagacagacacaggcaggtcccaagctgcccacagcagaggaaagacctggatgcagatcccagctgccaccacctcagggctttgctcaaagcagcaacaagcttcagctaccgcagacccagcggcgcctaccaggggccgcagcggagcacagtccccggcaagacaccggtcgcaacgtcctggggcaacggaagtcacgagacacgtgaagtgggaatgtggcccagctcaaatcagaggagaacgcaagatggtcagaccctggaatcagcagacaagggcctaaaacagcagctcaaggatagaaaagaaacgttctcataaccacttaaaaaggacaagccgcagcggtggagtggaacagggcttggcacattttttcttaaaggcagattgtgagtattttaggtcctgcaagctgccaacaggaggatcacttcataaccactcactaccagtgaggccgaaagccgctgtaacgacacagacgggcgccgaaagccgccgtaatgacacagatgggcgctgtgttccagtgaaactttaccactcactaccagtgaggccgaaagccgccgtaacgacacagatgggcgctgtgttccagtgaaactttaccactcactaccactgaggccgaaagccgctgtaacgacacagatgggcgttccagtgaaactttatttacaacaaccagtggccggcccacgggctgtagtttgctgatgcctaaaatagaacttatcaaagagaaccaagcagaaaccctagaatctctgacataaaaactcaatggatagacttacgagcagacagaaatgacagtaaagagagtgaactggaagacagatcagaagaaatcatcccatcggaagaccaaggagaaaaaatggtttttaaagtaaccagagcctcagtggcctgtggggcaaaatcaatagcttgtagccgcagcactttgggaggccaaggcaggaggatcgcttgaacccaggagttcaagaccagcctgggcaacacagcaaaaccccttctcgacaaaataaattaaaacattagctgagcctggtggtttgtgcccatagtcccagctactcagggggctgaggccagagggtccattgagcctgggcgggttgaggctgcaccccagtctgggtgacagtgagcgaggcccccatccttgcccagaaaaaggcctgatatatgtgtagctggagctctggaaggaagggagaatggggcggggaaaccttgaagagcgaatggtaaaaaatgtccccagtttggtgaaagacacacatttatagatttgagaaattttgcaagctccaagcaatgcaagtacagggaaaatcctgcctgtgggcacggcacagtcagactgctgaaaatcaaaaacaaatggagaatctttccatctgtataatgtgtgtgagttaccaataaagaactttcttcttgttccatgaaatgggcaaggaaggcgtgtctgctggaaatctcatccacggctgtggtttctcctgaatcggcgaatcgtctgcgcgaggctggggcctctggacagaagactgggcccccagagctcttggggggttcccatcttcacccggtgcctggattctcagggtcccacccacccccaccttcctcacacttcaccctctcttctctcttgcccttataaaatcattcacttcaaagtagaaattatgaaaccgtcttcatcaatcacggaagtttagcattccccgtgtttttgcctttggtttatcaacaactaaacaagggaagggaacaagcttctgcagaagcttccagcaaggagacagcgtcctatatgaggcgcctggggagggaaggtgccggaaggcatcgctgtggggctgccgccagctccggaacccccgggaacccaaggggcacacgtctccccgtgttcttgcagcccccgcgtcccgtgacccacccaggaggtgtgacctgccctccttgcttcaggctcccctctgtaaagtgaggaaatagccccccggggctgcagccagggcccagggcggtggacatgcagggtccaggactggctgaaccttgagccgctgcaggggccgttggatttggccctcgggagagaactccacagcctcctccagtgtgtccggcggcggcagccagggagggtgccgggaccttcagaccacacagcaagcggccagatctcaggctccccgggctcacggccccgctgcctcctcctgtcacccccgggtgagcccagagggctcggggtggggacagcagacaaaccctcagctgctgggcagtgcctccctctggggccatgggcaccgggacctgcacccctcagcgctgtgaggccactgtctctaaacgtgggggctgaaggggaaggggtgttcgtgcccagctcctggccggccaccgacatggccccttcatgggggccgggccagaggctcagaaggggagggcaggggtgcggctggttgagtggcatacagcgggggctcacacctcggctagcaaagtggctcccagacccggacgcctgtgcctggaagagcagcagacgcctgcagggcacagtggccacgtgggcgccacacagagcccagtgctgagaagcaggggccagcagctgccacccctcccctgctttccctgtgcaaatgggaaaaggcctcagaacagcgtggacgcagtgacccctttaacagaatgaggggatggaatcccgggtggctggagacctggacaaatgagaaacagcatcctcctccatttttagcttcagaggctcttaagggagggaggctgctgtgggaggagcatctggatgtgtgctggggggtgaccatcgaggggggtgggggagagtgaccatgggggggggagagtgactgtgggggggtggggagtgaccacggggtgaagagtgactgtaggagggtggggagtgaccacggagaggggagagtgactgtaggggggtggggagtgaccatggaagggggagagtgactgttggggggtggggagtgaccgcggggtgaagagtgactgtaggagggtggggagtgaccatggaagggggagagtgactgttggggggtggagagtgaccacagaggggagagtgactgtgggggggtggggagtgaccacggggggagagtgactgggggggtggggtggggagtgaccacggaggtgagagtgactgtgggggggtggggagtgaccatggaagggggagagtgactgtggggggtggagagtgaccacagaggggagagtgactgtgggggggtggggagtgaccacggggggagagtgactggggggtggggtggagagtgaccacggagaggggagagtgactgtgggggggtggggagtgaccaaggtggggagagtggctgtggggggtgggtggggagtgaccatgtggggggagagtgaccattgtgggggtggggaaagtggccatgttgggaggggagtgactaccacggagatgaaattaatgtgaaccactgaggcaaaggcatgaggccccctcactttggggtggggttagggttggggtgcaggtggagcctctgaaaggctttgaggagtttgcaaatgccctgcaggggagcaacttcaggtctcgctgacctttatccctcaggagaggatctccagtgaggctgtgctctccgggaattcttttgtgcaggtagacggtgagggcagcttcccaagcctgttaactgcacctgtgcctgctcacgtggccacagccgccactatcaaggagctctgggtcctgcccgcgaagccaggactttgtcacgagctttgcccggacgcagcagccggaagcggttgggaggattgattcttgatattgatgccacccagagaggacaaaggtggaaagacacacgaaaggggcccgagacgggggctggagacgcgcggaacccgggctgcggagagggtgctggggtgcgcggcagggccagggcagcccgcacagggcgcattctcacgcgaggtgtgccccgtgtctccatcatttgccccaaatgcaggagggcccggggtcctcccgaggggccccatgctgctccctgtcctgtggggccaccctgccaagcggggcaccactccagagctgggacagcagcaaaccagagccagaccccacaggttccccaccttctgggcgctgctcccagggacctgtctggccacttcccagcaggctgttttaacccgtgcagagctggtttcctatgataatctcgacttttctgggcagttgtaaagactgaaaatcagactccttcagagagagtgggttgactttgttctcaaacccaaggaaaacgaaggataaaacgtgttatttattatccttgttttaaagttattgggggccgggcgcggtggctcacgcctgtaatctcagcactttgggaggccaaggtgggtggatcacaaggtcatgagatcgagaccagcctggccaatatggagaaacaaaacaaaaaaaaaatacaaaatacaaaaattagccaggagtggtggcagacacctgtagtcccagctactcgggaggctgaggcaggagaatcgcttgaacccgggaggtggagattgtggtgagccgagatcgagattgggccactgcactccagcctgggagacagagtgatactgtctcaaaaaataaataaataaataaataaataaataaataaataaataaataaagttattgggtcaggtaagaaggagggatccggctgctgcttcttttttttttttttttttttgagacggagtctggctctgttgcccaggctggagtgcggtggcgcgatctgggctcactgcaagctccgctcccgggttcacgccattctcctgcctcagcctcccgagtagctgggactacaggcgcccgccaccacgcccagctaattttttgtatttttagtagagacggggtttcaccgttttttttttcttaaatagtgtctagctctgttgcccaggcgagcaccaccaggcctggctaattttactattttttgtagagatttttttcaccatgttgcccatgctggtctaaaactcttgggctcatgtgatcctccagccgcggcttcccaaagtgctgggattacaggtgtgagccaccgcgcccattctggggggatccaaagacactggcaccccatcctcaacccccaacaccccaatccctgccccacagacgcccgaatccccaccccacagtcgacacccgaatccccacagacgcccgaatccccaccccgcagacgcccgaatctccaccccgcagacgcccgaatccccaccccacagacgcccgaatccccaccccacagacgcccgaatccccaccccacagacgcccgaatccccaccccacagacgcccgaatcctcaccccacagacgcccaaatccccaccccacagacgcccgaatctccaccccacagacgcccgaatcctcaccccacagacgcccgaatccccaccccacagacgcccgaatctccaccccacagacgcccgaatccccaccccacagacgcccgaatctccaccccacagacgcctgaatctccccgctacacccaaatgcccacccacacccatgtggctccagttcccattcggcttcttggcgcccgcccctcacaccagtggagccaggggaaggggtgaccagtgctcaggcgcggagcccagctatggaatcacaagcagcccagagcgcgcccgggatggagatgccgcagggagacgcaggcctcaggatggagtagccgcaggcagacgcagtcctcagcgcgccagggatggagatgccgcagagagacgcagcccatagtgtgcccgggatggagatgccgcagggagacgcagcccacagtctgccggggatagagatgccgcagggagacgcaggcctcagcgcgcccggggatggagatgccgcagggaaactcaggcctcagcgcgcccggggatggagatgccgcagggagacgcagcccatagcgcgcctgggatggagatgccgcagggagacacagcccatagtgtgcccgggatggagatgccgcagggagacacagcccatagtgtgcccgggatggagatgccgcagggaaactcaggcctcagcgcgcccggggatggagatgccgcagggagacgcagcccatagcgcgcctgggatggagatgccgcggggagacacagcccatagcgcgcccgggatggagatgccgcagggagacgcaggcctcagcatcaccatcgcccccacgccgtaaaggacaaggacattagagaggaagacctcccgggagtcacacatgagaactaaagtttaaaactcaacagaggattgaaagaggaggttaagaatttctctcaggccacaggtggtggctcacacctgtgatcccagcactttgggaggctaacgcaggagaatcgcttgagcccaggagttccagaccagcctgggcatcatagtgagaccccgtctctacaaaatacaaaaactagccaggcatggtggtgctttgcctgtggtcccagctacttgggaggctgaggcagtaggatcacttgagcctgggaggtggaggctgctgtgagctgagatcgcaccactgcattccagcctgggtgatagagccagatcctgtctcaaaaaaaaaaaaaattatctcagaagatagagaaaaaaagacacataaagaaaatgtagggccaggcacagtggccacacctgtgatcccaccactttgggaggctaatggtggagcggatcacttgaggccaggagttaaagaccagcctgggcagcatggtgaaactctgtctctactaaagtaaattacaaaaattagctgggtaccgtggcgcatgcctgtaatcccagctactcagaaggctgaggcataagaatcgcttgaagccaagaggtggaggctgcagtgagctgagctcatgccactgcactgcagcctgggcgagagagtgagatggaaggaaggaaggagggagggagggaaggagggagggagggagggaaagaaggaaggaagggagggagggagggaggaaggaagggtttgagggcagagtaggctggtcccatgtgggccgaacgtggaaccctggaactcaggcgtgggcagaagatggagaaccgcggacaggcatcaccacagccattcccaaaaccaagcttgcggttccagactcagtgaactgccagggacctggcacagcaggtgaagttagctgtaccccaaagcatgtcagggagtgagaggagaatggggtgcggggagggggaggaggcctcctgcaaagaaccaggaatgaggaaggcctccgtgtctcgcatggatgccagaagaagctggcacagggcctgatgatttggaagggaaaccagttcccgcggcgcgaatcaagcaaggcaaaggcatctcagaggggccctgcgggcagccggcgttgtccctcctgcagtcagcgctccactgccccacactcagctggcttcccagggcctgagcaaggatgggggaggcttcgggagaagaggggctccaacgatgtggaggagaatgtgttggggagacaggtgctgggctggaccggggagccgctggaggcctgggggcattggaagcaggaggatccgtgggtgcttgggcccctggcggagcgcggcagcttgttgggagctgggagcagagccacttactgtgagctcagagaggctgccaagagcagcgacagagaccatcgttccctccaggcaaagccagatgctgtgtgggaaaggaaacgtggccgtacgctgccacggagctctaaggtgttcgtgtgggacggaagcactggtggaaaggccagaacccgtgggacacaccctcgagagccgccggcagcacgcttggtcccggcctggagacaggggccagcacagtcaggctctctctgagcccaggggtggagacctcactgggctttactgtggtgaccactggggagcggggcccaggggacaaggtgggcaggggctgctgttttctcgagtgaaccctagaactacttgatttttcatctgacaaagctaacagaggaaaagatgaggcccatggatgcatgagctctctgcctggcaggcaaacatgcccagtgcattttcaggcatttgctgagggcccgctacccacaggctggaacagactcagcccggaaaggcccaggcaggcggccgtggatgccatctcctgtgagtcgatggggtcagctgcctggggaatcctgcggggggaaggcgagggaaatggaggtggaggagctgtgggaaaggccagggctgctgggtgcaggggtgggcgggaagatgcaccagcagcacacgcagctttctctaggcactgctgtgctccaagacctcctgtggctcccactgtctcatagctgtgcctggacacctgctgccccaccaggtcttcctgtgtctcccctggccacagcccttcttcctgtctctgcaggtcccaccctgcattcttgtaacctcccatcacgactccctccagcctcataataagggctcagatacctgcccatccacatgtgagatcccaaaatatcgaacacacaccagcaaaactgtgagccgcaaggagagcactttggtcccactggccttgctgggcaggggcaagagtgtctcactgttctcggatggcaaggccggcatttaagtggacaaaagacctaaatgtaaaagacagaactataaaatttctagaagatagcatggaagaaaagctacataaccttgggtttggtgatgaatttttagatcaacaccaaaagcatgagctataaaagaaaaaattggtaagttggactttattaaaattaaaaactttttctctgcaaaagaagacatttgcaaaacacatatctcctaaagagtttatcattcaaacatacaaaggactctaaaaactcataggaaaaataaacaacccagtgagaaatgagccaaacatctgggcagaccccacaccaaagacaggcagatggcaagtaagcccctgaaatatgcacgacagcccatgtcatggcggagctgcaaattaaaacacacggagacaccaccacgtacccgtcagcgtggccgaaacccaggacacggatagcaccgaaggctggcgaggatgtggccacaggagtgtgcacccagcactgctggaggcacagggtggcgcggccacttggaagacagcgtggcagtttcctacaaacctaagcaggccatgaccagaaaactcaacggtcaggcccgcaggagttgaaatcctccgtctacacaaaagcctgcacatggaggtttatagcagctttattcataatcaccaaaatcacctggaagcagctgagatgtccttcagtagatggatagatccagacagtggaatatcattcagtgctaaaaagaaatgagctgtcaagccatgaatagacacggaggaaacacagatgcaatgactaagtgaaagaagccgctttgagaaggctgcacgctataggtttctaactacacgacattctggaaaaggcacaactatggagacagtagaaagatcagtggttgccacgggttagggggagagagggatgaacaggcagagcacagaagatttttagggcagtgaagctcctctggatgagactgtaatgctggatccatgtcgttgtacccatgtccaaactcacagaagtgtaacaccaagaatgagacctaatgtaaactgtggaccttaattaataataatgtaccaagaacgagccctaacgtaaaccgtggaccttaattaataatgtatcaagaatgagccctaatataaactgtggaccttaattaataataatgtatcaagaacgagccctaacgtaaaccgtggaccttaattaataataatgtatcaagaatgagccctaatataaactgtggaccttaattaataataatgtatcaagaatgagccctaatataaactgtggaccttaattaataataatgtatcaagagtggctaaactatgacaaatgtatcacaccaatgccacctgttaatagggggagtggggggtggaacggctggggtgtggctggagggaacttgatactatcagctcaatattctgtaaatctacaactttactaagaaatttaagtctattcgttttctaagaaagggtgtccccgaagctgttgggggggcactccttttggggtgagctggagaaggccaggctgaggggaccaggacagcattccaggcagagaacgtgcacggtgggcaggctgagtcctggcggagcccaggctgcggcacccctggaggaagggctgggcgtgcagaggcccagcagccagtctcatcctgacccacctatcaattctgactccacggtgctgacactactgtccggcgtcaccaagatcagagcaaataccagtcccacttttcactggaagataagagggggaaaggcggttacagaggtttccactgcagcaaaacccgagacagcagaaactggggctggagaattgcctcctgcagcgatactgagacttaggaacctgggcaccaggagggtgagggaggggggcgtgcacctactgtgagctgcgtggtgtgggctgggaccactgagatgccagctgctgcagactccagcagaccacaaagccaggggtgcttttggaacatgatagtggcactggttacagccgggatgtggcatcccctttggagttttggattggcaacatttaccatgggcagtatctgggagcttcattttgttgatgctttttgggaaggagaaaggccgggaggaaggctggcaaatggcacagccgctgtgccgggacgcaggtgctagatgggccttcacacatgggagcccccaccccctgctctaacagagctcaagtgccccctaaaagcacgtggcccctctgcggatgcagagttgggcgggaggagagcgccaggtgcacgagtgatacccagggtctgtgccactggggtgtgcagggcagagaacgcgtcagccccatggacagttgggtgggtcctggccacggggtccctgagacacagtggatgctgagacggccacgtctgacttcacagcacacacatgccacctccatgggacacacgtgctcctcaggggcccagggacagctctggtgggcagacagcagccccgggccaccctcgccttctccccctgtgatggtacacagtaagaatgaggaagtagttcctgacagctccttctcaggaagctttaacttcccacggccagcccttgtgttgcggatttaggtcgaacgcagctctcccatttgtcagcacctctggcgacagggctgcgccccagggctcctctccctctgaaggcaggcgggccacgcacagccactggagcttctcctgggagcagcactcagccaacccgagccagttccgcctgaagagattcccccactgtgtgctgggtgtgggcggtgggcaaaatccagagaagcagagacaatggtgcctggcaaggccccagccccggctcgggagggcaccctgctttctgggaagagattacttccctaatcacagttggctctaactaatcctaaaatgaaccttcagatcttgagaaaaccaggattaaagacagaaacctggaagtggcgctcacatgggcgagccctcggggaggcgtgctcaggcagtcccggttccaagacgcttcacacactccctcttcctccctgacctgaggtctcccaggctctgtgccgccagggctgtccctccaggggctctgtccctcagggggctctgaggcccagcctccggcctgtgccctccctcctcacctctgcagagtcacccaagaccagtggccgctggctcccccttcctggggcccaccctgccccccgaggcccatcgggtcttgcctgtcgggggctttgctcactgtggcccctcaggcagtcctgcccagtggctcccacatccagtaggtggggaaggagtggtacggcccgctgagggccccatgagggccgggttctaaggggaatctgccttcaccgtctggtcagccccgtgtcctctgcaccaaacatctggggctgaatctgaggacggagcccgcagtagctgctgttcttccacactttgtgtcacccccaaagctcttaaaaacaggcattttcaactttcccattcaggcttaaagaaaccctttcccaacaaagaactcaaacccttggactttggcatgacagctcagcaggcggtgagcctgcaggttccccgatccaccagaaaggaggaagctgccagtgcgtccctggctcccgctccttccctctgccctagccctgcacagtccagaaggggaccctggctctgtccctccccagggctggctcccagagccagatagggggtcccggctgggatggtccagcacaaagccctcggggatgcactcaaaggccgccctccagggaccaggagcttggcacaggtcacctggtctttccctaaggcagagccttccatggggagacatggggagatttctcggccccccactcctcaccccagagtccatggggagatttctcggtctcccaccccagagtccatgccatcagcctggagtctctgtcacagccctaaccacccccagcacagcagcacaaacggccaggcccattcccaggatgtgccgctccccatttgtggaattcccacagcccctcctgctctgcccgcccctccctccttcctttcaggcccctgtggacggtgcacacacgggaaccccttgggcaccctggctgctctcctgactccacctggacacggccccaggctccatctcaattcttcctagactgacgacacgacactttggaaatggacttgacacacagccagccccaagggaaggctggcagtcggatagaacagggagcccagagctcaggcttgtaagggcactcgccaatgtgagggagcaacccagagctgaacatggtcatcacacggccagagtgcaaggaccacctgctgctcctgcttatcctccacagggtcccctgctcctcagacacacacacacatcccgctgctcctgaaacacccacacattaccgcctgccactcacaaacccatgcacaacccctgccactcacacacccacacactccccctgcccctcacacacacacacactccccctgcccctcacacacacacactccccctgcccctcacacacacacacactccccctgcccctcacacacacacactccccctgcccctcacacacacacactctccccctgcccctcacacacacacactctccccctgcccctcacacacacacactccccctgcccctcacacacacacacacactccccctgcccctcacacacacacactccccctgcccctcacacacacacactccccctgccccctcacacacacacactccccctgcccctcacacacacacacactctccccctaaccctcatccacactttttgcctcgggcacttcgctctggctatcccttccctggacatgcttccccctaacccacagggctggctgccccctctgccccagggatggcttcctgactgtctttggtccttggtgcccaggagtgctgccccatgggatatttgggtctcatttgaagtgggatccccactgcctacagggcgtgatgggcactgaatgtttattgaatgaatattaaactggagagagctcctccattgcccagagcgctggctgctgcaaagtccagcattttgggctacctcgataagacggatgagaccattcaagctcctaaaagtggttggtatgctaagggtattggctgcctgtgacccgagttctattctgtgtcccaggagggtgccaggttgggcagttccagcaccaagtcagggcctgcccagggtgtgtctgcatcttccgaggtctggcaacatcaggatggggctgggtttgtctgtcttattccagaaggcatatagctaaggcatagctaagatttcagctgacagtggagcatgttttaggccaggtgagcgtggtttctctctgggcacatgacccactcctgagagagctctgtgtggggcagatggtgctcaccatgctgagcccagatctgccaaagtgctctgagccgatgctgcaattgcttgtcaatgatcccactttgcaggttaagtctgccactccttggcaggcggcgcctctaaagccattgtcatccagaagtaggtgtgctgctcactggaggctctgcagtaatttaaggaaataattcagccgaggagctgagacagcctcttcctgggcccagtgtccagatggttttggatgaagcttacacatgggaagccaatgtttatccctccactccttcactctcccatgtgtgcattcatccatccatttgtccatccactcattcgttcattcctccttcacccacctgtgggtgcatccatccatccactcatccatccatccatccatccacatatctacccatccttccgcccatccctccatttactcatccattcacccatccactcactcatccatccatcaatccactcatccatccaccaaccattcacgcatcagccatccatccatctgtccattcactcactcactcattcatccatccattcactcatccacctatccactcatccatatatccattcattcactcatccatccatgagttcactcacccacccatccatcaatccactcatccatccatccattcacttatccatatatccattcattcatccatccatccatcaatccacccatccaactattcactcatccattcatccaagccatctatccatccactcatccatccatcagtccactcatccatccagctatccattcactcatccatccatcaatccactcatccatccattcacccatccatccattcacccatccacctatccatccatccactcactcacccatctatcaatccactcatccatctatccattcactcattcatatatccattcattcatccatctatccatccatccatccatccacccatccatccattcacccaagccatccagccatccacccatccatccattcacccatccatccatccatccacccatccatccactcgtccattcaccgaaaccatccatccatccaaaccatccatccatccatccatccatccactcatccacccatctgaccattcactcatccatccatccatccacttatccatccatccacccatcatccatccatccatccattcactccattcatccattcgctcatccacccttccatccatttactcatccattcatccattcatcaatccacgcatccatccatctatctattcactcatccatccatccatccacatgtccattcacgtgctcagatctgcaggactctgctggggacaggcactggggacacaggaggaataagacagacaacctctgccattgtggcatcaacctggttgagccaaaagaccttggaggaggaggtgtcctcaggagctcagaggaggaaggctccgagctcaggaaaggtggagcaggagagatgctgagtgtgaagggatgaagctggggtgagtgcatgatttgggggagggtggagtctggcatcccaggacctggtaccctgagacctggcaccctgagacctgataccctgagatctagcaccctgagatatggcacttcgcgaccgggcaccctgaggcctggcacttggagatctggcatcctgagacctggcaccctgagacctggtaccccaacacctggtacccagaaacctggcacgccaacacctggcaccctgacacctggtatcctgagactcttgtctcaagggtgggtgaggaaagccttggtggcttcatcgtgcactgagactcctggttgtgggactcagcccagacgctgggcagatgatgtgcaggatgggaaccccaactctaaacatgccccagtgcagcccctggctcctggagaagccggcagtgggggtggccacgctgggagagctcagccatttctgcagtagacatgaggctggttgggtgctggagcttgggcccagacaggcatcttaacaagcctgtgtggtcacagggagcgccacacacgcccagaggcggggagctcctggggtggcagggagtgggctgggggggctggcggccaagagtgactcaccatccctgtctctctctcagcctctggcggagctgccaggtacccacagggagccctggtggttccttccctgccccgatgctatcagcacttcccaacctttgcccctttcctcaggattctcccgggcgacaccttagctccaaacgccatggattgttttatagcctacagctgattctccgtgggcagctcctggaaaatgaaacttcaccccttcagggccagaccctcccctgtggagactcctgggagagtctttgcttccaggcctcccgtgatggctcctgactccaaacccactgagcatacctctcctgccaggactggggtccacagggcccactcactggtcctctcctgggaggactgggtcccctggggactttgctgaccaccctggccttctaggccatccttgtccccagaacctcctttcctatgcttcttcaaggagaacctaagggcagttcagctggagtgggtagcagatatggtgaaggggtaggtgctgtgcgcattgagggattcctgcctccaggaccagagcacatgcaataaaaccattcaccccaggaggtgaaggtgacccacagctgccctcacagcctgggcactgagtgcccggtggaaggctgcacctgggagaaatccacagcttaggcaggtggtctaggcagtgtcacacccccagtggcggaggctccctgggacacgctgggtaagacagcgggggtccgggagtcaagtgtcgggtgaggacgacctcctgcacccacccagacaacaaggaagcacccagtgcctcagatttggggccgggagcagggaacctggcgctcagggatctgggtcttgaccctgtccagttaaggaggaggtgctggaaccccaaggctgaagctcctgcagaaaagcattcccacactcccacagtgggggtaacgccgctcagaggggggtgggggggctgcgccgctcagagcagggggctgcactcctgaccctgtgccctagcgtcctcctgaccctcctacggctgcgcgaggcactgcagactccagatacccgtctcgctcctgcctgcccttccagccagggttcaccaagatgtggggcggcctgggcctccgccatcacatccctcagcaacacaagctccacttcgagagcctgcccccaccgcccccacccagccccactgtcctggtttccccgtgggcagtcactgccgctgctcaggtcctaaccctcaaggcgccacctccctgagccagcgctgcccagctctggagttcaggccccatgggatgtcagctcccacacctcctgtgcgtccacgacccaaggggtacccacggccagacgcctggggacaaatagacccagctgggcctagaatccactcccggccccagcccctccccggtttccgacatctcaaaattgtaactcccccagttcccttttggtcgggtcctgtcgctcatgtgtggctcagagctgcagggcgaggtcagcgcagcagagccccccgaagggttgagaacaggatggggccaggaggtctggcccctgctgtgtcactgatgaccctgtgacatccccactcctgcttcaaggaggccctgctgtccaccgccctgatgcccaagggaagctccccaccatcctcccggaatctccccggtgccattctctgccccatggccaggcagtcgtctgagaactcagatctgaccacatccactcctcaccacgacgctaggtggggaccaaagtcctccaaggcctgtagctgagttgctcgggcctccctctgcctccccagggacccaccctaggcctcctcctctggcttctgacacccccgcctccctctccttccaggggcccattgcttgcagtcctgacacctgccactgcctggatcccaccccagggcccccacccagtgctgccaggcctggcagtctctgcaaggcacagcctcagcccccagaggaagcccaggaaggaaggaaagcctggcccagggttcccaacacggacggtgcagggtgaggcggggattctggtgggcacctaaggcctagagtggccctggtgcgggtggctgcaggctgggggcccccaaggggcacaggaggaagccccctcaccctgcctgaggcagacactaggccctgccgcctccactgctaaagacttcctcgtcctctcagtctgggaggtctgcgctgtggagtggctccgtggcctcggcccttgcctccccttctgcattttaaaaagatgctgtaaaaggcaggggaaccccagtgcacacaaatagggggcttgtggggagcccttgccggagccagacacgcggcctgaggctggtgggccaacagcagcacctgttccttgcccaggctcctgggccacctgctgaggccccagccccagtgtttgcttgaggcagctctggccctctggccatcctctgtcccaagctgcctggagtagaaatctcctgggatcaacattgctgtgggtttcagggtacccggactcttatttccccaaccaggttacaaatggcttgaagaaggctggggctgtgagttagaaactctcaggatgtgtgagaaattcaacaaatgtttggaaaagcaacaggaatggcagctcttttctgctggaagagacatttctgttcgtgtaacttgagactgaaagagtgtggccaacccctgaccattttaaacaacaaaatgtgccaagcagcttagtaggttcagaccccagtccgggggctgtgggcatgtggaggaggctgggtgaaactggagaagttcccgctgtggtgcaggcttgggccccggtgtctgtgaaggcctggacctgagggtcctctgggaacacaggtcgtgcacctgaggctggctgcacaaggaggacggtctgggccagtggaatctgagaagtccagagttcacagggaaggggttgggggaggaagcacacagggagggctgggggctgtgttcaagaggtgtggctggcagagaggggatggagggtgggacaccctgggggccaatccgggcagacccagagcagacctcagctgtcactgccggggctgcagagtgcacagtgggttgaggggacgacagggagcgtaaagggcaggtctggagagggtctgcgcctgtgggataccgcgatgagctcccacagctgcacagggtaaggctcgccttcccaggtggagccaacaatccgagacaaagacagccgctgagtgctatcagggtgggcctttgtaaaggaccgccctgccccggggagttgctgctggagccggcagcctccccgccctcaaggacgtcttcccagaaccagtccaagtgtttgggagacctgaaggcttttccctgtgaataacaaactctgaggccaggcaaagccctggtcagtgtgccttatctgccggctcccaggcggggctggctggtgcctggcggctgtcattggaccttcagatgccagattctgactctgtacactgggctaaactgggagaggccccagcttgtacagaaattagatattcacggccgggcgcggtggctcacgcctgtcatcccagcactttgggaggccgaggcgggtggatcacctgaggtctggagttcaagaccagcctgaccaacatggagaaaccctgtctgtactaaaaatacaaattagctgggcgtggtggctcatgcctgtaatcccagctactcgggaggctgaggcaggatgtggaggttgcagtgagccgagatcgcgtcattgcactccagcctgggcaacaagagcaaaattctatctcaaaaaaaaaaaaaaaagaaaaaaaaagaaattaccttttcagtttacaccaggggggcactcccgtcagaggaaagcagggtgagctttaggactgggcggccgcagagcccaggttgagtctggacctccctgatgccccaggggcccttctcaaggaaatcaactgtaggaggcagccagcctcagagactcccccccggccagcatcccaagcccccagtggaaagcccagggaggacagcctgagcctggagagcaggcagcccggcggggagctgaaagacaccagggcgaggaggaggctgcggagaagggaggaggcgggagggctcagaagagcccttatgagacagaaagcaaacacacaaggggcctgaaggggaggggagaccctggcataaatagggcaggcggcaggcgtcactgaaggaaaaggcgccttctccaatcaagcctgctgggcgtaccaggttccaccaaggccaaggtcctctcagctgttctccccggagcctgtccctcccctgtcctgcgtgggcgcccctcctcggccccagcatcgaaacctcctctcgccccagtccaaagctgctctggaaacctgccgcggcgcctgctgctctgatcttgcttctcctggccccactcgggccccctaatcccccctccacacgagtgaccacctccctgccacccctggagagaccctaccctgtggaccaacacatgaaactttgatccccacgagctcctcaggaagctgaccttcctgtcaccttgccaggagctacctgccgtgcccacattactggttcattggcgccggttaagaagaagagaaatctgaccgaccgggattttctaaaaaaaaaaaaaaaaaaggaggcccgccaatgggaacgctgcgcctgtagggaggattctgctgggtttcatgcgggtagcaccgcttttcttttctgcccttgtaactcacgaaaaaacgccatcactccaaggacgtttctctaaaaagcctgagaaccccgaaggaaacccggccccggggactccctgggcgcgagcagcctgcagtctgcggggctcggagcggaggcggggcggagaccccacagggacccgggagccgggagtccggggctccgaggctgtgcccccgccggggaggggagacctcgggacccgcaggggcggcttagcgcggccagagtcgctcccgagtctcgctctgctggacccgagagccggactctcccgggcggccgccgcgcggctccgacctgatgcgcgcggccacaacgaagcccccaggcccagcagaggcggccgcacaccccgcgggcagatccggagaccccggggccacttaccgatcttggccaagctggccacgaggatccagagcgcgatgacgtagggatcctgcacgtgggcccactcgaaggtgaccacctggaagcccccgctctcgccgtgcgcgccgccgggctccacctcgacgcccccggcccgcgccagcccgcccagcgccagcgccagcagcagcccccggtcggggccccgggccccgagtccccacattgccgcctgctcagcgcagggctgggacgcgcatgtcgcggggggtcccggctgggctgggccgacgcgcggggctgggacccggcgaggacccggcgcgctccggtgccggtaccggctacagtccgatccccgcccgccggggtggcctttaatcccgcggccccctcccgccccggggcggagcctgcccgcccccgccgcgcactcgcgagcgcagacaccgccgcagctcccggcacgcccgccccgcccgcgcacgcccaccccgcgctccctggtgcccaccctcccccggagcccgcggcctggaggtccgggaggtcgcggcaagagcgagcccgggactgcgcggccgccttcctggggcgtggggagcacagcgcggggcagcgggacaggcggttccgcgcagctcctgggatgcccgggcagctgtgggtgcgctcgccccaaccctccttcataaacgcagggcctggggctgcgcagaccccacagggcggcccaagggtgcacaggggccccaggtgtgtcttcacacagcccctcgctattgtcttcagcaggaacctgcattccacagccggaccggccacttaccagaactcgggggcgcccaggccttgcgtggtgcgctggtaagtctctctgcccctcccatcgccagccagcatcccccaccccaggctctgagatgggagcccaggggcccccgtggtctcccctgccccatcccctgcctttagacctccgcccaaaacaattcgatacccccagggcttcacacggatgcggggcctctgcccacagcccgctccggcagcactggctctcttaagcatctcaggctccactgtgcaaaccacacccctgttttcctccaagcccaccctgcagccttccagccccagacctgggacgcaggtggacttctttcgctcacaaggtttccaagctcttagcatatctgctctactttcaaaatgtgcacaaaaccagcggcttctgggagcctgcagccacctgcaaaggctcctgctcggccctctacctgccccttcagtccctcctattgggaccctccctctcagaggaaaggctcaacgtctcccgggagctcagaccccagccactgcctgacccccacccccatgcactccacggcccacaccagcaatcggcgcctctcggggcctttgcacgccctgctccctctgtttggacggctcttgtgtgctcccttcctcagctccccaggggcttggctccaatgccaccttctggtcccacccgatacccactcagctcacaactgtggcagctaagctcccgcctcccctgcttactcggttggctccgggaatcagctcacctcccagccctgggggctgctggctttgaccttgagctgtctgccctcaccctgggaatgtctgctccacgagcaaggggctcatgcatacatcccaggagcttggaagatagctgggcacacaatagcactcgcaagatagtggctgagcggatggatgatagatggatggaaggacagataggtggacaaagggcaggtgggcggtggggtgggtgcagatggaggatggatgtg
